United States Patent Application Publication US 2007/0032414 A1 - sequence listing, part 2

SEQ ID NO: 968 - DNA, 5820 bp, Homo sapiens
  misc_feature (123)..(124): n equals a,t,g, or c
  misc_feature (1476)..(1476): n equals a,t,g, or c
gattcaggaaaatggctcccttatcaccatcctggtcattgctggtgtcttctggatccaccggcttatcaagttcatctataacatttgctgctactgggagatccactccttctacctgcnnactctgcgcatccctatggtaagactgggaagttgggcagttagcccatagtctaagacgtattgggaggtgtgggtgtattcctgggcatcagttatccttatctgtcattgacaaatcaggaactgtctcttaagctcacaacccctgaatctcacttctaatatagggcaaaggggtcgaggcaacaaccccaccttccgtaccttgtctcttccccaccccaccccgcagtctgcccttccgtattgcacgtggcaagaagtgcaggcccggatcgtgcagacgcagaaggagcaccagatctgcatccacaaacgtgagctgacagaactggacatctaccaccgcatcctccgtttccagaactacatggtggcactggttaacaaatccctcctgcctctgcgcttccgcctgcctggcctcggggaagctgtcttcttcacccgtggtctcaagtacaactttgagctgatcctcttctggggacctggctctctgtttctcaatgaatggagcctcaaggccgagtacaaacgtggggggcaacggctagagctggcccagcgcctcagcaaccgcatcctgtggattggcatcgctaacttcctgctgtgccccctcatcctcatatggcaaatcctctatgccttcttcagctatgctgaggtgctgaagcgggagcgggggccctgggagcacgctgctggtcactctatggccgctgctacctccgccacttcaacgagctggagcacgagctgcagtcccgcctcaaccgtggctacaagcccgcctccaagtacatgaattgcttcttgtcacctcttttgacactgctggccaagaatggagccttcttcgctggctccatcctggctgtgcttattgccctcaccatttatgacgaagatgtgttggctgtggaacatgtgctgaccaccgtcacactcctgggggtcaccgtgaccgtgtgcaggtgggccaggccacaggcgggagcaagccggctagcattcctgggaaaggcatacatctcaccatgatcctgatcccactaggtcctttatcccggaccagcacatggtgttctgccctgagcatgctgccgcgtgatcctcgctcacatccactacatgcctgaccactggcagggtaatgcccaccgctcgcagactccgggacgagtttgcccagctcttccagtacaaggcagtgagtggagttggagttagggcctgctagagactggctggtagctcggtggtgagggctgggctccctcctgctcgcttgtgaccttgtcccgcccttttaggtgttcattttggaagagttgctgagccccnattgtcacacccctcatcctcatcttctgcctgcgcccacgggccctggagattatagacttcttccgaaacttcaccgtggaggtcgttggtgtgggagatacctgctcctttgctcagatggatgttcgccagcatggtcatccccaggtactgggagaggagggagccaggtggcctgggatgatgctggaacatacagtgtctttgggaaaaccgcaaaaagacacctctcctgagtcacacaaaggcagtcctataccaggggcacactgcttgggagcctgggctggatttcagccctaattcgcacccttggccaagctcccttaagaaaggcacaacacggccaggcgcggtggctcacgtctgtaatcccagcactttgggaggccaaggcgggtggatcacgaggtcaggagatcgagaccatcctggctaacacggtgaaaccccttctctactaaaaatacaaaaaaattagccaggcgtggtagcgggcgcctgtagtcccagctactcgggaggctgaggcaggagaatggcgtgaacctgggaggcggagcttgcagtgagccgagatcacgccactgcaatccagcctgggcgacagagcgagactccatctcaaaaaaaaaaaaaaaaaaggcacaacacaagtaactggctcagcatgcagtgcagcccctcctgggtctgggggggcacagtgccctgggaaagattgacagtatactgtggtctccgttctccaagggtaaggcctccccactaacaggaaaggtgcaggaaggctcctggaagagaacagccctgcttactctgctcttccttgtgcagtggctatctgctgggcagacagaggcctcagtgtaccagcaagctgaggatggaaagacagagttgtcactcatgcactttgccatcaccaaccctggctggcagccaccacgtgagagcacagccttcctaggcttcctcaaggagcaggttcagcgggatggagcagctgctagcctcgcccaagggggtctgctccctgaaaatgccctctttacgtctatccagtccttacaatctgagtctgaggtgtgttcctggtgactgggagatgatgggcagagtggacttcaggagctgggagttgagggaccgggcatggggtggaaggcttcctgctgtctcttcagtatgtgccactggggcctgagatacagaatactagggaccccagagacctttctcttgcctcaagaattctacctacccgtttcgttcatagcccctgagccttatcgcaaatgtggtagctggctcatctgccgggccctccactgcccagagacctgcagggctccaggcacagggctgaagtcgcctctgccctgcgctccttctccccgctgcaacccgggcaggcgccacaggccgggctcacagcaccatgacaggctctgggtgagtaaatcggggccaagatgggagggcacggcagccctcagcagcttgtgtgggtctcagagaagttcacagctgctgtctgtctctgttgggagagacagggtggatgccaggacagccagctccgggagcagcgtgtgggaaggacagctgcagagcctggtgctgtcagaatatgcatccacagagatgagcctgcatgccctctatatgcaccaggtgagtgcacagctaaaaaagagagtagagggtttagatgcggagaagcaagaccggggttccaaacccttctctgccatttacttgttctgccacctccactcccatatctaccttcttaatatcctttttagctaagcctgctctcatccagggccttcacacactcgcagtttcccctgcctagaatccagttccctgggatatccagatggcctcctccttcttcttgggtctctgcagctgccgtttccctgagactttctctgatcactctcagtaaaaggctcccttgcccaccctcctgaatcttcctgtcttagttttctccatagcatttagcaccatgtgacatatcatgttttttccttatttatttgcttattccatatctcctctaccagtatataagcctcacaagggctggcatttctgtctgttttgttcactgctatctccccacacctaaaagagtgcctggcacttagaccgtcagtcagtttgttcctgaatcaaatgaataggtaaaatgagggccattacaacacaggcttcttccggggatctgctgtgaatgtaacctgtaaagatcagaggtatattacacactattaacataataggtgctctgaggcaaggattctcagggaaggggtaaagcgggaactgactgataccaggttggagggcagctgtttcagatggacatccgtctgtcccccactaacgagccccccatttctccagctccacaagcagcaggcccaggctgaacctgagcggcatgtatggcaccgccgggagagtgatgagagtggagaaagcgcccctgatgaagggggagagggcgcccgggccccccagtctatccctcgctctgctagctatccctgtgcagcaccccggcctggagctcctgagaccactgccctgcatgggggcttccagaggcgctacggtggcatcacaggtatccagtgggggtataggaggaaacagaggctgcagggaagggtggttcttccagggcctctcaaggggaggaaagaggtctgagagaacaggcccaaagactcaccccccaagcagccccccagccctgttcctcattcttgtgttccttctatgagtatgcttactcttacttgtctctccagatcctgcacagtgcccaggttccctctcatttctctcggctgcctcttggagggtgggcagaagatgggcagtcggcatcaaggcaccctgagcccgtgcccgaagagggctcggaggatgagctaccccctcaggtgcacaaggtaagcgcccggggcctaggaaaaactgccagaaatagtaacttccagggtgaggtaacagcttttcaggggaaggaagatatgccccacccccacacagagatactgtaccctcccttccaaaacacactaccccttcttttctcaactgctctgcagggcttggtttttccttaccttacctccccaggaatcaacctttcctgtccctttacctctaggtttctatggggctagcaggtatcaaccagaagctgaagactatctccattaccaaccctttctccccacaggtatagacaaggctgagcagggttcctgtggcccaggatggaggccaccgctgccctgccatcccgtctgcctgccatgggacggctcctctgagtgttccctggccccacgtgtgtggtgtttgtgtgtctgtgcctggccaagggaggtgccaacactgggcttgccacagccccaggagaggaatttggggcctaggaaccgagggcacacgggactctagcctcatccccaggacccccttggctcagagtgtggtgctagaaactggcccccagcccagccccagtactgccacctttacacctacccctgcaagtccccagaggctgcccacgatagaagctgccaagcagggagaacctgtgccaactgtggagtggggaggttgggcctggaccctcaacccctgcaaccttccctagccccctcaatagatgagcaggtcaggctgtggccattacctcacccgcagttctcgcccagtgctgcagccggctcacctctctccgcttcttgcacatcactggcctgtgtgtgctgcttgctcctgttctgttcgcttgctcacgttccgttcggcttttgctttgcgttagggtgaagacctagcgtccagctcccctcaacgctatattttgacactaaaaaagaaggtttctaaattgtaggagcaggatggaaatactttgctgcccttgccatcttttaggatgggcccccaggagactgaggtcttcctgggccctcattgctgcttatcgtaccccccatcacctgcacatgggacagaccgggctggagggtgaccttggctgtgtgcgtcccagcaaaagagctctggcgcgcatctcgctgtgccctgaagggggatggatgacgagtccggtccgaggctttgggctgctgcactgcatgctgggactgctcctactctctgtcccacccctcacccagctgtggtccggctttgggagagtggtgaattgcgctgcccgaactcggagcggagcagggtagggaccgtgtacagcttgataacccttaataaaaagggagtttgaccaga

SEQ ID NO: 969 - DNA, 5836 bp, Homo sapiens
gattcaggaaaatggctcccttatcaccatcctggtcattgctggtgtcttctggatccaccggcttatcaagttcatctataacatttgctgctactgggagatccactccttctacctgcacgctctgcgcatccctatggtaagactgggaagttgggcagttagcccatagtctaagacgtattgggaggtgtgggtgtattcctgggcatcagttatccttatctgtcattgacaaatcaggaactgtctcttaagctcacaacccctgaatctcacttctaatatagggcaaaggggtcgaggcaacaaccccaccttccgtaccttgtctcttccccaccccaccccgcagtctgcccttccgtattgcacgtggcaagaagtgcaggcccggatcgtgcagacgcagaaggagcaccagatctgcatccacaaacgtgagctgacagaactggacatctaccaccgcatcctccgtttccagaactacatggtggcactggttaacaaatccctcctgcctctgcgcttccgcctgcctggcctcggggaagctgtcttcttcacccgtggtctcaagtacaactttgagctgatcctcttctggggacctggctctctgtttctcaatgaatggagcctcaaggccgagtacaaacgtggggggcaacggctagagctggcccagcgcctcagcaaccgcatcctgtggattggcatcgctaacttcctgctgtgccccctcatcctcatatggcaaatcctctatgccttcttcagctatgctgaggtgctgaagcgggagccgggggccctgggagcacgctgctggtcactctatggccgctgctacctccgccacttcaacgagctggagcacgagctgcagtcccgcctcaaccgtggctacaagcccgcctccaagtacatgaattgcttcttgtcacctcttttgacactgctggccaagaatggagccttcttcgctggctccatcctggctgtgcttattgccctcaccatttatgacgaagatgtgttggctgtggaacatgtgctgaccaccgtcacactcctgggggtcaccgtgaccgtgtgcaggtgggccagggccacaggcgggagcaagccggctagcattcctgggaaaggcatacatctcaccatgatcctgatcccactaggtcctttatcccggaccagcacatggtgttctgccctgagcagctgctccgcgtgatcctcgctcacatccactacatgcctgaccactggcagggtaatgcccaccgctcgcagacccgggacgagtttgcccagctcttccagtacaaggcagtgagtggagttggagttagggcctgctagagactggctggtagctcggtggtgagggctgggctccctcctgctcgcttgtgaccttggtcccgcccttttaggtgttcattttggaagagttgctgagccccattgtcacacccctcatcctcatcttctgcctgcgcccacgggccctggagattatagacttcttccgaaacttcaccgtggaggtcgttggtgtgggagatacctgctcctttgctcagatggatgttcgccagcatggtcatccccaggtactgggagaggagggagccaggtggcctgggatgatgctggaacatacagtgtctttgggaaaaccgcaaaaagacacctctcctgagtcacacaaaggcagtcctataccaggggcacactgcttgggagcctgggctggatttcagccctaattcgcacccttggccaagctcccttaagaaaggcacaacacggccaggcgcggtggctcacgtctgtaatcccagcactttgggaggccaaggcgggtggatcacgaggtcaggagatcgagaccatcctggctaacacggtgaaaccccttctctactaaaaatacaaaaaaattagccaggcgtggtagcgggcgcctgtagtcccagctactcgggaggctgaggcaggagaatggcgtgaacctgggaggcggagcttgcagtgagccgagatcacgccactgcaatccagcctgggcgacagagcgagactccatctcaaaaaaaaaaaaaaaaaaggcacaacacaagtaactggctcagcatgcagtgcagcccctcctgggtctggggggggcaccagtgccctgggaaagattgacagtatactgtggtctccgttctccaagggtaaggcctccccactaacaggaaaggtgcaggaaggctcctggaaaagaacagccctgcttactctgctcttccttgtgcagtggctatctgctgggcagacagaggcctcagtgtaccagcaagcggagggatggaaagacagagttgtcactcatgcactttgccatcaccaaccctggctggcagccaccacgtgagagcacagccttcctaggcttcctcaaggagcaggttcagcgggatggagcagctgctagcctcgcccaagggggtctgctccctgaaaatgccctctttacgtctatccagtccttacaatctgagtctgaggtgtgttcctggtgactgggagatgatgggcagagtggacttcaggagctgggagttgagggaccgggcatggggtggaaggcttcctgctgtctcttcagtatgtgccactggggcctgagatacagaatactaggggaccccagagacctttctcttgcctcaagaattctacctacccgtttcgttcatagcccctgagccttatcgcaaatgtggtagctggctcatcctgccggggccctccactgcccagagacctgcagggctccaggcacagggctgaagtcgcctctgccctgcgctccttctccccgctgcaacccgggcaggcgcccacaggccgggctcacagcaccatgacaggctctgggtgagtaaatcggggccaagatgggagggcacggcagccctcagcagcttgtgtgggtctcagagaagttcacagctgctgtctgtctctgttgggagagacacgcccgcacgccaggacagccagctccgggagcagcgtgtgggaaggacagctgcagagcctggtgctgtcagaatatgcatccacagagatgagcctgcatgccctctatatgcaccaggtgagtgcacagctaaaaaagagagtagagggtttagatgcggagaagcaagaccggggttccaaacccttctctgccatttacttgttctgccacctccactcccatatctaccttcttaatatcctttttagctaagcctgctctcatccagggccttcacacactcgcagtttcccctgcctagaatccagttccctgggatatccagatggcctcctccttcttcttgggtctctgcagctgccgtttccctgagactttctctgatcactctcagtaaaaggctcccttgcccaccctcctgaatcttcctgtcttagttttctccatagcatttagcaccatgtgacatatcatgttttttccttatttatttgcttattccatatctcctctaccagtatataagcctcacaagggctggcatttctgtctgttttgttcactgctatctccccacacctaaaagagtgcctggcacttagaccgtcagtcagtttgttcctgaatcaaatgaataggtaaaatgagggccattacaacacaggcttcttccggggatctgctgtgaatgtaacctgtaaagatcagaggtatattacacactattaacataataggtgctctgaggcaaggattctcagggaaggggtaaagcgggaactgactgataccaggttggagggcagctgtttcagatggacatccgtctgtcccccactaacgagccccccatttctccagctccacaagcagcaggcccaggctgaacctgagcggcatgtatggcaccgccgggagagtgatgagagtggagaaagcgcccctgatgaagggggagagggcgcccgggccccccagtctatccctcgctctgctagctatccctgtgcagcaccccggcctggagctcctgagaccactgccctgcatgggggcttccagaggcgctacggtggcatcacaggtatccagtgggggtataggaggaaacagaggctgcagggaagggtggttcttccagggcctctcaaggggaggaaagaggtctgagagaacaggcccaaagactcaccccccaagcagccccccagccctgttcctcattcttgtgttccttctatgagtatgcttactcttacttgtctctccagatcctggcacagtgcccagggttccctctcatttctctcggctgcctcttggagggtgggcagaagatgggcagtcggcatcaaggcaccctgagcccgtgcccgaagagggctcggaggatgagctaccccctcaggtgcacaaggtaagggccccggggcctaggaaaaactgccagaaatagtaacttccagggtgaggtaacagcttttcaggggaaggaagatatgccccacccccacacagagatactgtaccctcccttccaaaacacactaccccttcttttctcaactgctctgcagggcttggtttttccttaccttacctccccaggaatcaacctttcctgtccctttacctctaggtttctatggggctagcaggtatcaaccagaagctgaagactatctccattaccaaccctttctccccacaggtatagacaaggctgagcagggttcctgtggcccaggatggaggccaccgctgccctgccatcccgtctgcctgccatgggacggctcctctgagtgttccctggccccacgtgtgtggtgtttgtgtgtctgtgcctggccaagggaggtgccaacactgggcttgccacagccccaggagaggaatttggggcctaggaaccgagggcacacgggactctagcctcatccccaggacccccttggctcagagtgtggtgctagaaactggcccccagcccagccccagtactgccacctttacacctacccctgcaagtccccagagggctgcccacgatagaagctgccaagcagggagaacctgtgccaactgtggagtggggaggttgggcctggaccctcaacccctgcaaccttccctagccccctcaatagatgagcaggtcaggctgtggcccttacctcacccgcagttctcgcccagtgctgcagccggctcacctctctccgcttcttgcacatcactggcctgtgtgtgctgcttgctcctgttctgttcgcttgctcccgttccgttcggcttttgctttgcgttagggtgaagaccctagcgtccagctcccctcaacgctatattttgacactaaaaaagaaggtttctaaattgtaggagcaggatggaaatactttgctgcccttgccatcttttaggatgggcccccaggagactgaggtcttcctgggccctcattgctgcttatcgtaccccccatcacctgcacatgggacagaccgggctggagggtgaccttggctgtgtgcgtcccagcaaaagagctctggcccgcatctcgctgtgccctgaagggggatgaagggcgatgcctcgcccgaggctttgggctgctgcactgcatgctgggactgctcctactctctgtcccacccctcacccagctgtggtccggctttgggagagtggtgaattgcgctgcccgaactcggagcggagcagggtagggaccgtgtacagcttgataacccttaataaaaagggagtttgaccaga

SEQ ID NO: 970 - DNA, 6487 bp, Homo sapiens
gttggcaggagggtcccggcccagagccagcggggccgtgctgagacggcgtacgtgccctgcgtgagtgcgtggcggcgcgcgtgcgctaggggagtgggcggtgaggcctggtccacgtgctccttcccgggacccccgcagcttgggcccagcggctacgtgagcaaggcacccggatgtccgcgccgctctccgagtgaccagtcccggcctccggtcccgcagtgcccgcagcctcggccggcgtccacgcattgccatggtgactgtgggcaactactgcgaggccgaaggggcccgtgggtccggcctggatgcaggatggcctgagtccctgcttcttcttcacgctcgtgccctcgacgcggatggctctggggactctggccttggtgctggctcttccctgcagacgccgggagcggccgctggctgctgattcgctgtcttggggggccggccctcgcatctctccctacgtgctgcagctgcttctggccacacttcaggcggcgctgcccctggccggcctggctggctgggtggcactgccgggggcgcccactgccaagctatctacttctggcctccgtgctggagagtctggccggcgcctgtgcgctgtggctgcttgtcgtggagcggagccaggcacggcagcgtctggcaatgggcatctggatcaagttcaggcacagccctggtctcctgctcctctggactgtggcgtttgcagctgagaacttggccctggtgtcttggaacagcccacagtggtggtgggcaagggcagacttgggccagcaggtgagggactctgtgggaagggggaagcctctgctggccgggcttgggagaaagcactgcatgtccagtcacactgcttccaggctttaggatgcctctaagcaaagggagaagggaggggctgagtcctgccgggagctgatagccagctggtggggtgtgtctttgctgagtcactgtggttttgcttttttttttttttttaagcctgtaagtgctgaatgtgttcatgacaccagtccccggccctattataagtagtaatacaatgaaattttatcctcaatgatactctctccacttatatttcattctaggttcagtttagcctgtgggtgctgcggtatgtggtctctggagggctgtttgtcctgggtctctgggcccctggacttcgtccccagtcctatacattgcaggttcatgaagaggaccaagatgtggaaaggagccaggtacacctcagtttctttttttttttggagacggagtcttgctctgtcaccaggctggagtgcagtggcgtgatctcagctcactgcaacctccacctcccgggttcaagcgattctcctgcctcagcctcctgagtagctgggactacaggtgcatgacaccacacccagctaagttttgtatttttagtagagacagggtttcacagcattggccaggatggtctcgatctcttgacctcgtgatccgcctgcctcagcctcccaaagtgctaggattacaggcgtgagccactgcgcctggcctctttttgtttttaagacggaatcttgctccgtcacccaggctggagtgtagtggcgcgatctcagctcactgcaccctctgcctcctgggttcaaacaattctcgtgcctcagcctcccaagtagctgggattacaggtgtgtacccggctaatttttgtatttttagtggagatggggtttcaccatgttggccaggctagtcttgaactcctgacctcaggtgacccacctgcctcggactcccaaagtgctgggattacaggcatgagccactgcaccagaccccacctcagtttctgaatcctggagtctcttcatttcattccctgtcatcattccttcccccaaaatgaaatgcttcttttccaaatctcagtttgcaacttagtttttctgaccccatcaaggatcacttgtgggtctgagatacctgggagctgtaaccccataggtttttccctgaagggtttctggctagtgcacttacttgatttctgagctcccttcctacgtgtttcaccatcctaggttcggtcagcagcccaacagtctacctggcgagattttggcaggaagctccgcctcctgagtggctacctgtggcctcgagggagtccagctctgcagctggtggtgctcatctgcctggggctcatgggtttggaacgggcactcaatgtgttggtgcctatattctataggaacattggtgagcaggaggagcaccagctcagtgtgctggtccttcatcagcctggtggctgggatggtccttacctagggaggtgggacagagctgggtggtcagaaagagactgtggctggtacctggggccattttgcctgaagagagtcctgggcgccataagtgggttctgactcgtttcctccacagtgaacttgctgactgagaaggcaccttggaactctctggcctggactgttaccagttacgtcttcctcaagttcctccaggggggtggcactggcagtacaggtatgagagactccgccctcaccctgctaggtataggtccctcccacaggcattccctcagcatccgcctctcccagcattcctccccagcccccatgtactctcagacctttcacatcctggtgctgggctgacgtccctcagctcccaggccctactgaggcgtcccccggctccctgcaggcttcgtgagcaacctgcgcaccttcctgtggatccgggtgcagcagttcacgtctcggcgggtggagctgctcatcttctcccacctgcacgagctctcactgcgctggcacctggggcgccgcacaggggaggtgctgcggatcgcgatcggggcacatccagtgtcacagggctgctcaggtgccgccccagtggaaagggcatgtgggagggtggagccggagaagcagggataggggcccgtgggaggaagagaacagaccccgcctgagaagctgccgctcccaccttggtgttttttaaagtataggattattgtatacatgctctcctaataacttaggtaatgcgggcagagggcaaatctctttcgagctgcacttactttttcagagcttcccactctgtttagtatgttgggttctgctctttttttgagacagggtcacgctctgtcacccaggctggagtacagtggcataatctctgcggcactgcaacgctctgctcccgggttcaagcaattctcctgcctcagcctcctgagtagctgggattacagatgtgcaccagcatgcctggctaattattagattttttgtagaaacagggtttcaccatgttggccaggctggcctggaactcctagcatcatgtgatctgcccacctagcattccaaagtgctgggattacagttgtgagccattgtgcccagctgggttctgcttttttgcatttttacatacatattatatatgcagactcacagaactaatatggcattgtggaggtttttcctaaaacaaatggtattgtgacatagccatcattctcagagttgcttattaacagaacattatggagatatatttttcttccatgcctgaaggtctccctcattcattgtaattgatacagagaattctgtagtttgagcatggttgatttagccacccacctcttgagggtagaattaattaagactggttccagtctgttgcttgaaaataaaacactaccctgaaatgcctagaggcagggttgctgggtctaagcccccagacctttcttattcacttgacctgccctcctagctacctggtgttcaatgtcatccccacgctggccgacatcatcattggcatcatctacttcagcatgttcttcaacgcctggtttggcctcattgtgttcctgtgcatgagtctttacctcagtgagtgctgctgggagacaccgtctccctgaactatccagggactcccttggccatgagctgtgcccccactcaagtgacccacctatgggaggctgtggattggtggacttgaatgggctcctagtgctcgtcatgtgatgggcgggtctcttctgtcaaatcaaaccttaacctagctgaggggctggggaaggacattcttgtcacgttaagtctgagccgtggacacaggtcaaggaagcctcgtttgtgtaacaagatgcagcttgctttcatttaccaaaagcgttttctacacatgagactttgtgcaggctgcagaggtgcctccctgtggaatctgggtgtccgggcttgagcataggcttagtgtgtacatggcaggtagtggacattgacatttggtctctgcttttggggatgatgtcctattctgctccccatcctgtcactctccagccctgaccattgtggtcactgagtggagaaccaagtttcgtcgtgctatgaacacacaggagaacgctacccgggcacgagcagtggactctctgctaaacttcgagacggtaacagagggcccggtggcagtggtgtgaggcgtggagatgtggaggagtgtaaccaggaccactggggctgacagagagctgggggtgtgatgtttgtgtgtgatgtttgaactcaggaaggaggattgagagttggggggaatgacccgagtgccatgtgctgtgcccatgccaaataaatttggtttgaattcatcaggtgaagtattacaacgccgagagttacgaagtggaacgctatcgagaggccatcatcaaatatcaggtgaggatgctagtttgaggcctccggagaataatgccctggcctggtagaattttcagggccaagagtgatagtcgagtgttggggtagaaggggcctgggcccaggtttggactcactgatggccattgtgtataggacattcctcttcctgtgttattgccctcagggtttggagtggaagtcgagcgcttcactggttttactaaatcagacccagaacctggtgattgggctcgggctcctcgccggctccctgctttgcgcatactttgtcactgagcagaagctacaggtgaggcaggatcttggatgagagagtggggcacaaggaaaagggggcctgaggcctgtgtctggtcaccaggctcttcggtaggaagtgggcagggtgacacaagaagagcggcctgcaggccccccgtgacatgctctgcttccttgattgccacaggttggggactatgtgctctttggcacctacattatccagctgtacatgcccctcaattggtttggcacctactacaggtaatctgagccctggccctcacctgtccagggcacattattatttcctggctactcagagaagtcctaaccagcacctttttgcaggatgatccagaccaacttcattgacatggagaacatgtttgacttgctgaaagaggagacagaagtgagcgaagggagaggagtagggtttggggagggaggagctgtgtggtgtttctcgtgcttggaaaacacaaagctgagaacctcagcacacatgggtggtgcccttccaggtgaaggaccttcctggagcagggccccttcgctttcagaagggccgtattgagtttgagaacgtgcacttcagctatgccgatgggtgaggccttccttttgcttcctttgcttttccgttcatttgcacactgccttcctgcttctcagtgctctgaatccctgcttttggaaaagagcctgggcaggggaggggcagggcctactagcagctctggtgatggaaggtgcctgctgagcaaccccacctttccttgcaggcgggagactctgcaggacgtgtctttcactgtgatgcctggacagacacttgccctggtgagaggagacccagccacttggcccagatgcctcaagcttccctcattcagtgcccatggtagcttgtgacccaggctgtggagtcagagagcccagtcacgataggcaaccggattgaatggtgcagcctccatggacactggtgacctcttggagagggaacctcaaaagccagtgggcctcggccggctgcggtggcacatgcctgtaatcccagcactttgggaggcttaggtggccagatcacctaaggttaggagttcaagaccagcctgaccaacatggtgaaaccctatctctactaaaaatacaaaaattagccgggcatggtggcgggtgcctataatcccactactagggaggctgaggcaagagaatcgcttgaacctgggaggcagaggttctagtgagctgagatcgcgccattgcactgcagcctgggtgacggagtgagattcggtctcaaaaaaaaagccagtgggcctgagatttttcccatttccaatgcaacaggtgggcccatctggggcagggaagagcacaattttgcgcctgct

SEQ ID NO: 971 - DNA, 686 bp, Homo sapiens
gttggcaggagggtcccgggcccagagccagcggggccgtgctgagacggcgtacgtgccctgcgtgagtgcgtggcggcggcgcgtgcgctaggggagtgggcggtgaggcctggtccacgtgcgtcccttcccgggacccccgcagcttggcgcccagcggctacgtgagccaaggcacccggatgtccgcgcccctctccgagtgaccagtcccggcctccggtcccgcagtgcccgcagcctcggccggcgtccacgcattgccatggtgactgtgggcaactactgcgaggccgaagggcccgtgggtccggcctggatgcaggatggcctgagtccctgcttcttcttcacgctcgtgccctcgacgcggatggctctggggactctggccttggtgctggctcttccctgcagacgccgggagcggcccgctggtgctgattcgctgtcttggggggccggccctcgcatctctccctacgtgctgcagctgcttctggccacacttcaggcggcgctgcccctggccggcctggctggccgggtgggcactgcccggggggccccactgccaagctatctacttctggcctccgtgctggagagtctggccggcgcctgtggcctgtggctgcttgtcgtggagcggagccaggcacggcagcgtctggcaatgggca

SEQ ID NO: 972 - DNA, 755 bp, Homo sapiens
tgaagtagaacatgcatgagaaagaatgcagaaatcatgaataaacagctccagaaagggatcacgcccaactaaccagcacccgaattcagagcccaccagcccccgggatcccggccacgtccactctgaccccatgcctgcaaggatagggtctctatcgtgacttctaaccccaccaggtacttttgcctctttttagaaatggaatcatacagtctgtactcttttgtgcctggtttgttttggttaacattgcgtctgggagttttatctctgtccagggttggcgaaccccagcttacaagccaaatctggtcctttgcctgttttcatatggcctgtgagctaaggatggattttatgtttttaaatagttgcgggggggggcgggggggggaggaaagaatgatattttgtgacgcgtgaaaattatatgaaattcaaatttgtgtccacaaattgactgggcatggtggctcatgcctgtaatcccagcactttgtggggccgaggtgggtgggtcacttggggccagaagtttgctaccagcctgaccaacatggttgaaaccccatctctactaaaaggtacaaaaaaatagctgggtgtggtggttgatgcctgtaatcccagctactcaggtggctgaggcaggagaatcacttgaacccgggaggcagagattgcagctgagccaagattgtgccactgtacttcagcctggatgacagagtaacactgtatctcaaaaa

SEQ ID NO: 973 - DNA, 554 bp, Homo sapiens
  misc_feature (20)..(21): n equals a,t,g, or c
  misc_feature (31)..(31): n equals a,t,g, or c
gcagctgcagtcaagagcgnncgcctggccntcggcctggcctaagccctgcatccatgatgaggccggggcaggtctccctcctgggtcctgatgctgtttctgtgctcggctctggcttggcctcagccctggcaccagctctggccgcaaccctgaccctggctctgggccgggcactctgccggatcccagctccaaacccctccccggctccagatccacccccagccctactcctgtggaatcttctgacccaaaggctgggcacgacgctggtcccgaccttgtgcccagcccagaccttgatcctgtgcccagcccagaccctgatcctgtgcccagccctgatcccaaccctgtgtcctgccctgacccctgttctcccactcgtggcactgtcagcccagccctccctaccggcgagagtccagagtgggtacaggagcaaggggcactgctggggcctgatggctgaaggagacgccggcatcctcgggggcctggggaagttgtgtgttgtgcagtcagtaaaatcctcccactgcctccgg

SEQ ID NO: 974 - DNA, 205 bp, Homo sapiens
gccagggccagccacaatctggagctccagtgtcctggcttccttcttgggcccaccagctagactttccagcttaacccacagtgtctcatcctggtccatcccactagtcaccactctctgttcctctcacttaccccttgctcttcaaagcccatacagtaggtatacaagtggacaaaaaaagttgctcatttatgcaatc

SEQ ID NO: 975 - DNA, 1274 bp, Homo sapiens
ctgaaagcttttgggtctcactggaccatcaggactgctgccgcccctctggagagagcagctttttatttgtctgtagacagggaacatgatgggcactgacctcctgtaaagaataaaactgtgggccgggcgcggtggctcacgcctggaatcccagcactttgggaagccgaggtgggcagatcataaggtcaggagattaagaccatcctggctaacacggtgaaaccccgtctctactaaaaatagaaaaaaaaactagttgggcatagtggcatgtgcctgtagtcccagctactcaggaggctgaggcaggagaatcacttgaacccgggaggtggaggttgccgtgagttgagattggaccactgctctccagcctgggcaacagagtaaaactctgtcccaaaaaaaaaaaaagaatacaaccttgcaggatgtctctcctggagacagcaagagggagaggagggagagggctctttcttagaaaagaggcctttggtgagcccagaagtttgaaaccagcctgggcaattcagcaagatcccatctctacaaaaaataaaaaaaaattagtcatggtgccacttgcctgtggtccccactgcttgggaggctgaggtgggagaattgcttaagcctgagagttggaggctcagttagccatgatcatgccactgcactccagcctgggtggccattgaattctgcgtggattgcctcagtttgccttgtcagccaacttccactggctgccttggcactgccatgacagcacagctccacaccagagctggggtttctcttcagtcctgggtaccccttggcagagggatttgctgaggaaaattaggtatccttcctagccctccacacacttccaaaccagggctgcggatctgatggatgccaggaagacagccttgggctgagagtgacgtcactgcaagagttgagagccagcgtctaaagtgtccacggcatcctgggaggttttatccttggcgactctaatggtagatttttgtccaccttgttctatttgcttttgtttgtttttgatttttctgttttaaaattttaaggagagatggggtttcaccatgttgcccaggctggtctcaaactcctgagctcaagcgatctacccaccttggcctcccaaagtgctgggattataggtgtgagccaccgcatccagcccacattgttctatctgtatttcatgaaagcagttctgaatgagagtaaatcagcttcagggtgta

SEQ ID NO: 976 - DNA, 1052 bp, Homo sapiens
ggacattgcccccccgcctgctgaggctgttccttcctgctgcacttgagcagcctcatcttccttcatctcctctcatgttcacttctctttgcctggaccaatggggaaaaaagtgcacagaatgagattatgtgactacagcaattctgagttagctttgattgctctgcagtaaaattaagggaccatatctttctcatgcacatgatatatagtttcaaatatagatctgtacatacgtgatgatgaaaagttcttcaggatgaggatgtatcagagagtgtgaattgaggccagtcttctgtttcctcccaaactcttaacagattgcatatcttcatgcaaatcttttcatgtattccttgtatactacctatagaaaggtgggacttgggagggtcacttacaactcctgtgatcttattttctcctccaggggctccttgaatagagttttcccccattttactggccaaggctgcagttagagctgtggtttgtcctgcaggggatatttgtcagtgtctggagaaatttaggttaacgcgactggagaagtgctattggcatctagtgagtggaggccagggatgctgctaaacaccccgcggtacacagcagaccaaagaatgatctagccccagataccagtagtgctgaggttggaaaactcttaagttagtaaatatacaactgataggaaaaacatgaagtttcaataattaaaaagctttgcacgaaagtttattacagggctgggcatggtggcttaggcctgtaaatcccagcactttggggggccgaggtgagaggatcacttgagcttaggaatttgagacctgtgttggcaacatagtgagaccccatctctaatatatatatatctgggcatggtgtctcctgcctgtagtcccagctacttgggagggttgaagtgggagaatggcttgagtccaggaggttgaggctgcagtgagccatgattgcatcactgtactccagcctgggcgacagagcaagaccctgtctccaaaaaaaaaaaaaaaaaa

SEQ ID NO: 977 - DNA, 431 bp, Homo sapiens
ctgtgaattgacacatatagcttcctctactgtaaaggttgatgtggctaatgagaaatatttccacatcttctcctttatttcaaggagataggctgtggaagtcagacgtctctaagccccaagctgttttatgtagcctgttgttagtatgtggaagctgaaattcttacagagttactctagaattgaaaaatctatctggaagtttggggagtactcatagtgcactaattattacaaattttcattatcttacttggattaaaaattattagagagccatttgtcatactgcttagattacaaacaattatagagttctagagtgcattataagctcataggaaatggaactttgtatttggtggcaaacctttattctttaggtagatatttgaggtggctcagcagatttatatgttgcggta

SEQ ID NO: 978 - DNA, 865 bp, Homo sapiens
aaggttcaattcagtacatccataaatcgacagaatgaagaaaacataacaaaaagccacctattccttcctcttgctcccttattagctaaagtaaaatttacatctgtaagacttactgagttgctgccaaaatggaactgaattcttaaaagcaggaacatgcctatgtgaaacattagaaaaccaaaataaatgggaaaattcagacttgaagagctgaatcatgtgacaacaaagtactgatcttaattcagaaaggctacttggagaaggtgtatcttaaggggtaaaaaacctgtgggttaccacatattaacagggaataatatcaacagaggcacccataagcaagcaagacacaactgagacagatgtaccaggtgaaaaaaatcttcagtatggatacacatgggtattctgaaggctacaatgaatggtttagtctttgacataaggaggatgaacatattatttatactgtgtaatctaatctggcttctatggggaaagcaacatgtacataagtgaattttctacatgaagtgggctacttctgattttaatcaaagctataaaatagattgtatatttcactagcttcttaaagtaactcttccattttcatttatctctaaaaacagttaacttcctgtgctctaggaaatgcaccaataccaaaggtcaatgtggaaatatgggcatgtttgccctatgctgtgtggtctctagatttctatatttgctttgcttttgtctgctctagtaatctccctccttttgatctgtggcctgggaaaatgtggtttctttgtatttcaaataaaagtaaaatagttttttgagtggttcactcaagagtaaa

SEQ ID NO: 979 - DNA, 651 bp, Homo sapiens
attatttggaaataaagaaggaaataaagatggcttcacatggaaatttaagttctttcagggtggagatttacttggttcatacaccttttgcctgaattaaagtatttcatgtaggaggacttttatcctttttgatagacagtttcatatatcttgaactcaatatctcagatctcttctactgtattactgaatagcatacatacatagacaatgttcgccattcactagatatttttttctattatcttacacttattcaagcttgtctgtgattaatggaattggtgtcagatgctggaatttattctgaccaatgaacacagctgactcaggggagtacaatctcctgccaagtaatagaaccaaacccaatatgcataaaagaaatacaatactccaggctttagctgaaggaagcaactacctgtgtaataacaaagcagcaaaaactatttctcatgtggctgcataggctgtatattatatctgatctctaatgtagcttactggtttgccttttttaaaaccaaaattggaaattttcctttgtaaagaaaaaaagtcttatgagataattgcttgattaatgttttgaacaataccaagaaattgtttaattaaaataaatatttttgtttgaaattg

SEQ ID NO: 980 - DNA, 185 bp, Homo sapiens
tttgaaataaaatatttatttcagataaagttaatatttccataattaaggtaaagcaaacatatatgcttgagtccattatttaaggactataaaatgacttccatgaatattagagttcctgaatgtcatttgagtatctgcctacatgcttgttggaagcttctgtagccttttctttgtag

SEQ ID NO: 981 - DNA, 3788 bp, Homo sapiens
ttgttattgcaggtaagcatgtgacattatttgtgtgttgccttccctactagaacatcagctccacaagggcaggaatttttgcctgttgtcaccacgatgtccctggcacccagtatgttcttggtgtccccattgatgatgcagggatgtgtggatatggggcagtggactgtgagcatgtgatgagcatgtgacccagcccctagtgaccgcaccacatggcacaggttgcttataaaaaccattttaaattaaaaaagggaggaagcatcagtgcacacagatggggacacaggggcagagggcccagccccaagtacagtgtggtcaccccacagcccagtgggcaccagggcagactcccctcgcagcacagacagctgaggcccgggtgctggttcctctaggtacagctttggtccttgtgggctcagaggtctgcctttcggaaacttgctctgttcaaggagttcctggaaaaagaatgagggtgggtcagcatggccatggggcccccaactccatagacctcccagcccacatcctcttcctcctcctcctcgtcttcctccaaggatccttctgggatctctcctgtccctgatctggctgtgggattctccgattctctcttgcagtccaccacggaaggtatgaatcatccccattttacagatgtagaaactgaggctcagaaagatgaattcatgtatctgggaaatgactgctcagagcctgccctgcctttgtacatctggatgacatattcagatgcttatgcaaaattgaagccaccgcagccaggcgtggtggtggctcatgctgtaattccagcactttaggagggcaaagcggatggatcacctgagatcaggagttcgagaccagtctggccaacatggtgaaaccctgtctctactaaaaatacaaaacattagccaggcgtggtggcagatgcctgtaatcccagttactcaggaggctgaggcaggagactcgcttgaatctgggaggcggaggttgcagtgagccaagactgtgccaactgcactccagcctgggcaacagagggagagtctctcaaaaaaaaaaacaaaaaaaaaaccggaaacaaaacaaagtccaagctaccagcaaacatgttgctgtgtatgtgtacaacagcccccatcctgtacctgtcctggtctgcctctgcatcccctctctagtctctaggatgggggcactaggtcaggcacctgaggccgggtggggtgggtgccatcagctggggcaggcgctgggtaagcaggggctgcagagcctcccgcaggcggcagtagttgcgctccagctcacggtggtactccttctggtccggcccaatcagggccttatttttccgcagcgcatcctcacatctgagggccagagggtgggagatgctcagagactcgcacacgggactgaaagcaagactaggggtgggggcacccataaggcgggaccaggcctgcagaaagacccgcaataggaggtcaggttgggagagtggacttaatgggaatcgggcagatgggggagccatgcagagatcagatgggcagagagcaggcctatgcaggttaggcagacacgagacccctcctggggggttttgcgcctacttcttgcagaagtccttgaagcagagccgcaatttgttgtgatgccggaagagcttggggtcttccgggatctctgctaaaaacacctgggccacctccaggggaccctgtggggtgagagggactggtgagccagcctgcatggcacctggagtcccccgtgcggcttgcatcccccttccaccagccgtgcctggttcacggtgggccctacagagccctgaagcaccatctgtagcatcttagcatctggtgggtcctgctcggtggcaaaggccagctcccgtgtcttcttctgcatgtcctcgatggccacctccactggcgtcagcaccgtctgtggggtaaggggaggggtgtgtactcgctggggcctgaggaggtcctgatcgaagccagtcgggggcagctcagaccccgctgggagtgagaggggtccaagaacccaggcaatgaacagaatctgggggccttcctgggtctgactctgggggggtccagccttgggtctgctgggtctggtgccctggggtccaggggctttacctctggggtctccagacttccttgggtctggaggtagagatttggactggaagttggagtttggggtccccaacctggttctggggtacatgagccaatttctgggtctagcgtgtccacgcctctcctctctgggtctggaatccctgggcttctcctccctgggccttcttagatttggagtccctgtgcctcccctttgtgagtctagaatccctgggtcctcctgggtctggaggtagaggtttcagtttagagattggaatgcagggtctccatatcttctcagcccagttctggggtacctgggcctcttcctgggccacacctctcctccctgggccttcctagatctgggctccctctgcctcctctttctgggtctggaatccctgggccaccctgggtctggggtccctgcatcttgcctcccaggtctccctgggtctggtctcctcccctcccctccctggggatctggtctagggtccctgtgccacccctctctgggtctgaggtccgtgaaccaccttgggtctgggtccctgtgtctaccctcccctcccctcccagggtctgatgtcccctcacctccccacccccgccaggcccaggatccccacccacctcctcccggtggcacacacggatgcgagtcttgatgtaggggaaggcgtggtcggtgctgagcagcgtcttacgcttgtgttgctcgggcagctccccgtgtgcgcgcccatccggcgtgaacggcgtgcagaacaggaatgtgcgaagcccatagttgcggtcaaagtaggtcacccggtccttgagctcgtaggtatcaaagtacggttccacatacgtgatctggatgtaggcctgggcgcagggtcaggtgtgaggatcccacagccccagcacgcacagcccaagccctgttcctggagagaggggatctggggactttgtcatttccaagtcttcctatgtctggatgtttgggaatcccctgaggaataggttttggggtccctcagtgaaatatgatttggggtttcccagagaaagaggatttgagggtccccaggaaacagcacttggagtctctgtgaatctaagattttggggaaatggttgggggacccaccttttgtgagtcaagcttggacttgtccacagggttagagtctttgataatctcaacgacgtcgtcgccaaatctctccgtgtagaactcctggagacacagggctgactcggggccacccagggacagcccctactccagccccaaggcagccccatgccccgttccacccccaaccacaaggacgtgcctccagccggtgtgagatctctgccagcttcgtgatcgatggctccttgtacacaaactcctgctcatccaggtcaccgaagtgggcgccgtagaagcccacgcggaaatacgtcccgaacacgcgctggggctgtgagaaagggtgtggttgtccgggaggcccctgctggaggtctccctgccccagagataggtgtctcgaatatcaggatgggagtgtgaggaccccgagaacatcagggcatgggcacaggcagggggccctg

SEQ ID NO: 982 - DNA, 128 bp, Homo sapiens
gagacaatgtcatgggagaggtcagaggtcagagttccctcaacccccagggtcctggttaacactgccccgtgagaatcattccgtggggggagagatcagagacgggaggggggcgggggcgaaga

SEQ ID NO: 983 - DNA, 3211 bp, Homo sapiens
tgcgagtcagactgcctgcagcaccggctgaggcttacctggggaaagagaaccacggcgccgggagttaggagtctgtagggggaggggaggagatgaggccagccccctccacagctggttcacccagccccccaacccaggtctgggacccactcatagacgcacacccagcctggctgcggaagggccccccccgaccccctcccccccgcaggtctggaacaaagaaaccaaacctcactgcctgcttgcacatctgtccaggccctggacaggctccagctgttcccatagcccagcctccacatagccctggggctggggggccccaagcccaacaggccccacccttcctgcaccccctcccctcagcccaggcccggagctggccacacggaaggatgggggttgaggcgctaaggggttggggaagaagggaacctcgtcttcctgcaaggatctgaggagacagagacgcagggggacaaagagaggcaaagcatggcgaaggggacccccagtgaccccaaagctgagagctgggtcaggcctggactgggtcggggggaaggggtagggaaagttggggaggcagctaggagtgaagcctttcccctttatggaaacaattttctctaaaaataaacagtttcactgccgggctacacagaacttcctgcccgcctaggatgcgtccgggcccaggggcgcagtagggatagagggccgggtggaggcccaggaagtcctgggggtggaggggaggaagtaagagggggcgcctggaggctgcaaaagggagggacagtcagagcctctcactaaacccccctcagccttggaggccggccagggctcttttgtccccaatataacccatctgaacttggctggtcctttctgttatctgacctccagccatcatgctgcagaggccccagcccatcccaccatcagagtaaatcctttctggcctttgagtgctggggccggcaggtaccttgggaggatgggccaggtagggcacctgctgggcatgaaggcagggctggggctccaggggcacctgagcttgtccttgttctcccgtcctgtcttgctttgtctctctccaagtctctctgtgtctctccacgtctctctgtgtctctccacgtctctgtctctctgcgtctctctccacgtctctgtccttctgcgtctctctccgtgtctctctccctgtctttccacgtctctgtcttcgcttctctgtctttcaacacctggaacacatggtcaccaattgcaggaaattccgttttccatttgcctggaggctcacccctgagcaacagaaagttgattgaaaatattttctggccaccaaagagagatggagaagcagggagcaagcgggattggagcaggattggaatagccgagcggggtgggctgggggtgggggaagtgagggtgctgctgggtaaatagtatagtaacagtaatactaacatcaactcttttttttttttttttctgagacggagttttgctcttgtcgcccaggctggagtgcaatggcgcgatctcagctcacggcaacctctgcctcccaggttcaagcgattctcctgcctcagcctcctgagtagctgggattacaggcacctgccaccacgcctagctaattctgtatttttagtagagatggtgtttctccatgttggtcaggctggtctcgaactcctgacctcaggtgatccgcccgccttggcctcccaaagtgctgggattacaggcatgagccactgcacccagcctaacatcaactcttttaattgtcatgacaattctatgagatgggcacttatcgccccgtttcacagacaggggatgcagagggtacagaaaggtacagtggcttcctcggggtcactggggccatggggaagtggctgggcctgaacatgaacctaagcctggtggatccccccactgcccaccaagccaccaccctcagactccacatcagatatctctacccgtttcccagatacggagactgaggtctgagggtactcagtcatctcaccgccctcgatgaggaccagcacgtcccgagtaaggggaagagaaaggagacgagggggtgtggtgggggagatggatgtctgtggctgagacccttctctcgccatgggacccctggggaatggggaaggggtgacaggataagacagagatggagagactggagcctataagaggggacaggtagggagcgcagggaaggggcgcgggtctccccaacccaccacccaagaccggcctgcacatcgcggaggtcggtggtggtggtgggggggggtcttcccgccccaaactcggggtggggggaggcgagaaggaccccgccccgtgcagagagggggcggggcctgtgggatcccgggctaatggcaaacagctgccgctccccacgccggcccagccgccaagcccaggcccagcccggccggacgcccggccgccttcccgccgtctggggcatggccgcggaggagggcgaggggggacagtgcggggagagggcagagccggggaggaacagaggcagaaagtgggacagagacaggggagagcgggcagaggggagccaagacaggagaaacgggcagggcacgaggaatcgatggggggtactgggaggaatcgatgggggtatggggtcaaagacgaggagggggcagggacgcggggacagacactccaagtctggaaagtttgggcacagaaggtggagttggaggcagcggctcgttgagaccagcgaggtcgtgtcccagggttggaggcggggggtagggtagtaggtgtgtgtggagggggtgcacactcgatccccgaaccagacttgaacccctacccagccccgggtcccactcgccttgcgcgctccggccgctgccttccctgggtcccgccgcccgagcgtcttcgcgcgcgccgcagcctgggcgcccggccctcggaggtggctccgcccgcaccacgccccctccggctggtcccgcccccccagccggcaccgccccctccagccgcccgggcgccccggccgcggtggggggtggggatggagagacgctggttggagactggatctcacctggacagcaggtgtgtgtgcgcgccggggtgtccggcctcgtccttccttcctccc

SEQ ID NO: 984 - DNA, 2914 bp, Homo sapiens
cgggaaaacgtggaaagagggtaaaatctgtttccagattcctctggcacctactggtgccctttggataagcaagtgctgactccagcaaggaagggctgatgtcctgccatcaggccagcagacgctggggccaggtgctcccctgcgtcgtgagtgtctcgaacttaacgagcctcaatattctggggagaagttttggtttctttcagcccctgggggtctgccctgggctcccggcctccggggctgctcctcaggctggacagcctaggtgagccctgccccgcctgcccccagagccgacgcgcagcctccaggttccgccagcaccaacgtggtcctgcgccacgatggcgccgtgcgctgggacgcgccggccatcacgcgcagctcgtgccgcgtggatgtagcagccttcccgttcgacgcccagcactgcggcctgacgttcggctcctggactcacggcgggcaccaactggatgtgcggccgcgcggcgctgcagccagcctggcggacttcgtggagaacgtggagtggcgcgtgctgggcatgccggcgcggcggcgcgtgctcacctacggctgctgctccgagccctaccccgacgtcaccttcacgctgctgctgcgccgccgcgccgccgcctacgtgtgcaacctgctgctgccctgcgtgctcatctcgctgcttgcgccgctcgccttccacctgcctgccgactcaggcgagaaggtgtcgctgggcgtcaccgtgctgctggcgctcaccgtcttccagttgctgctggccgagagcatgccaccggccgagagcgtgccgctcatcggtgagcagcgggggcgcggggggacctgacgatgcgctggggtccccccagggcggggccgcgacagggcctgggtctgcggaacggccccactgcagaaagtgagaggggggcgtcctgggaacgtgccctcattttaagactgaggggaaaggattagctccttccagggagaacacccctcacgacttggcccttgatgatggaacatcagtatccccagatcctaatgataggcaaaatctgtcgactgcttgctgtgtgccaggcactcccctaagcacttgacctttattaactcaggtaagcatcaccacaaacctaggaagtaggtcctctgggtatcccatttgtacaaaaaggattcgtatcttgccccagctcatgcccgtcgttatttgagagcgggactgtcctggattgtgtatgagtgcagcctccagcagtgacgggagcaattagagagcagtagcttccgatgacccacgtgtaggaatgaaggatggggagaactcggcccttacctccttcctgcttccatccatggggcttggagggtctggagagcttcatggtgggcttatttccatttgtgcagaggtggctgggaagctcaggaaccacaggcttttgttttgagtcaattggctttctctctctcttgcagggaagtactacatggccactatgaccatggtcacattctcaacagcactcaccatccttatcatgaacctgcattactgtggtcccagtgtccgcccagtgccagcctgggctagggccctcctgctgggacacctggcacggggcctgtgcgtgcgggaaagaggggagccctgtgggcagtccaggccacctgagttatctcctagcccccagtcgcctgaaggaggggctggccccccagcgggcccttgccacgagccacgatgtctgtgccgccaggaagccctactgcaccacgtagccaccattgccaataccttccgcagccaccgagctgcccagcgctgccatgaggactggaagcgcctggcccgtgtgatggaccgcttcttcctggccatcttcttctccatggccctggtcatgagcctcctggtgctggtgcaggccctgtgagggctgggactaagtcacagggatctgctgcagccacagctcctccagaaagggacagccacggccaagtggttgctggtctttgggccagccagtctctccccactgctcctaagatcctgagacacttgacttcacaatccacaagggagcactcattgtctacacaccctaactaaaggaagtccagagcctgccactcccctaattccaaaaaaaagaggaactctacaaaggccaagatcacagagtacagtcttggagggacagaattgtttgtgctgggtattggagctctcagtggggagcacatgggttataatgagaaactgaactgtactgctgcatttcctgtcttccttcctaggtggctgctttgcagggctttggctgttacctttccctgctgaggggctcagggaaaagggtcggggattctcagtcgagtttccagagcaggaggccctacagacatttggccccaaatccctgactcaataaagtaagcgtgtacctagcacctcctcgatgccctgtgttacccatgaggtctgtggtagtggaagctgggggtccaggtctgtctacttcaggtctcatggccgctggcgcaagtccaagttcaaagcctgagaacctgaagttctaatgtccaatggtaagagaaggatgtcccagctccaggaaagagtgtgaatttgcctttcccttatttttttgtcctctccatgccctcccacattgagagtggaacttgccactgagtccaccaactcacacgccaatctcctgctgcaaaccctcacagacacatccagaaataatgctttcccagctgtctgggtattgctggtgtccatggtggtgggttatcagaacttattaatgtcactgtcactaaagttggtatataaccccccactgctaaatttgactagcttaaaaaaaaaaagaac

SEQ ID NO: 985 - DNA, 5257 bp, Homo sapiens
gccggcccaaccctttattcagagtctcactcctacagccctgggtaaggttcagtccccagattgtctcctgtttctccaccagccggtctggcagctaccagagaaggtcccagagttccctgcagatgggattgacaggaatcttggttacactgaaagcacacatggccaacatcctcaggatgggcagaggcagcaggcgaggctgtcccgtgtctcatgcatcaaaggaggcctggaccatctggaaaggccctcaccacgaggaaccagagcagcagcagcaaagaccagactgcagagagggggctctgacccatggctgcagggaaaacaggcagagaggttgggggagagagagagaaaaaaagaggtatttaggagcacaggagcaaaagtggggacatgcagatacaaggtggagagattggcagagtgagctggacagactgatacacaaaactgccacgggcaacagagatgaagatcaagtttagggaggagctggtccaatggtaatgggttatcagaacttattaacaccagtgtcactaaagttgatgtacagtccccccactgctaaatttgactggcttaaaaaattttaggcaacctgggcaacatagggagaacccttctctacaaaaaatacaaaaagtagccaggcgtagtggcatatatctgtagtccaagctacttgggaggctgaggtgggaggatcgcttgagcccaagagtttgaggctacagtgagctgtggtggtgccactgcactccaacctgggtgacagactgagaccacgtctcaaaaaaaaatttttttaataaagaatttaggaaggtagacagagatgagaccaattagagtcccagtttctcttccagaggtcattgggtctaacttaactgccttctattgccacaaataaggtgctgcagagtgggatgaaacatggatttaagatcagagtgggatctgctgtggctgaacttggctcctctacccaaaccctggtaggagaggtgtggagtggactagaaggagaaatcctaaacttttccagtatctggaattacataatcagaactcaaagatgcctgggttggaagctggaaacctggcttcttgtcctggctctgccataaactcattgtcaccttgagcaaataatttgtctctgggtctcacttgaccatataaggggggtaatgcctcctgttctgcctccttcccatagattactgtgcagtaaagatgagatgagatgatgatgagatgagatgagatgagatgagatgagatgagatgagatgagatgagatgatgagatgagatgatgagatgagatgagatgagatgagatgagatgagatgagatgatgagatgagatgagatgatgagatgagatgatgtctggggaggggtgggaactatcctggtgtggtggttcagagtttggctcttgagccaggctctctggactccacttcttagtagctgggtggcacagggccagttgcttctcctctgcacctttgattttttttgtttttgttttgttttgttttgagacagagtttcgctcttgttgcccaggctggagtgcaatggcacaatcatggctcacagcaacctccgcctcccaggttcaagagattctcctgcctcagtctcccgagtagctgggattacaggcatgcgccaccacgcccggctaattttgtatttttagtagagacggggtttctccatgttggtcaggctggtctcgaactcctgacctcaggtgatctgcccatcttggcctcccaaagtgctgggattacaggcgtgagccaccacacccggcctctctttgcccctttgtgctttggtactttcatctgcagaacagaggtgatgacagtaccactggggtgtggtgaggatgaatggcatgatgtgcctggagtggatcagaggaagctggggggtccttcctgcccactcacagagttctgaaggacaaaggagttctgaaggcttggggaggagctgctgtttcttccctggaaatggcccattcccacctagaaacatggtggcctgggtaggccttggcacaccaagtgtccgagggaagagaagagtcatagctggggatcatctggtccaatttgcttattatacacacagagaaactgaggcacagagaaagaatgggttggtcgtagagaaagttagagcagagcctggactagagcccaggcctccagcaccaaaagcctggcctcatggccttcaaaggtgggtttgagggagccctgagggcagtaacagagacagtgggttctgcactgggaggcagagaaggaccaaaggaggactttgtggggagcagcccttctgtccctcacctcagtgcagcctgaatctctcaggggcctgatcagtggccttttcctgcaagggataggcagatccaggctggagagcaggtgtccctgctccctcaaccatctgctctcccacacactcatctcctggctaaggctggcaacccccaaggtgccacttcagctagtgcacttttttttattattaatgcagttgtttccttataaaagattcaggtgggccgggcacggtggctgacgcctgtaatcccagcactttgggaggccgaggtggatggatcacctgaggtcaggagttcaagaccagcctggccaacatggtgaaaccccatctctactaaaaatacaaaaaattagccgggcttggtggcatgcgcctgtaatcccagctgtaatcaagaggctgaggcaggagaatggcttgaacccgggaagtggaggttgcagtgagccgagattgtgccattgcactccagcctgggcaacaagagtgaaactctgtctcaaaaaaaaaaaaaaaaaaaaagatcgaggtgatggggccaaccccagagcagcctgctcatccctgaactgagtcccacaggtgcctgcagcccttacctgaattatccagatggcaaggcccagacttgcacttcttgtctatagaaaagaaacagtaaagaatgaaaggctcaggagctgtcaggatggaaagggacctcagagccctggtagtccatccctgacttgttctaggagaagttggtgcatttccccctaattctgctctttcatggtggaacctcccttgactaggtttgcctcgacccatgagcagcagggccagaagggagtgggccatcagagccagggtctactctggggcactcctgctccctgggcctataactttgcctccctgccacactcacctctccctcttccatgcctcgccccagcctggtttgttttctttgcatgccctccttaccttctgtcaactcatgcatgctcctgatgttgtccaagataggaagtaaagcccatagcccttcagaaattaagaacctgggcccatcctcatggttcttcttctggcctgtgctggggacatgaacaggaggagcatccaccacttcctgaccacagcctgagctggaccttaggggcacagcacccaactgctgtctccttgcccccaccaccccacccagcacacccttcagcacataattcctcttccatctcataaatgcactgttctcagaaactgagggtgggactcctactcatttctggcaacagctatctaggtgtcaataatctggctggaaaataattcccttccagcctctgaccaggagaaaagcccgaccgggtctgcttgcccactcaaatggccagagaccgctgcgttggccaggaaacctcttcagcctcccagcaggcaagtggcgaactatggcttagatcccttcaggggcagtaagtgcacccctcagaaggttatgtctccccttagatggaaggggttgggagctggtggatatgacttgtatttatgtatccctgggacacaggagataggggcttcggtttgccaaagtccctggtggatgtggaaggtccaccttccgcacaggtgccgaccagcgcttgccctcctacctttgatgtactcgcagttgtaggtgctgtgcttgcccagggctcggaggtagatgcgggcggggccctgggccagtctgctggcattgatcacttggaaggtctcaaagggggggatcagcacctcttcctctccagggaagaaggagtagcccttgataggggccccaaggcaggtccagatgccgaagaaggtgtcctcaccaaactgctgggctgcaacatgcttcagggaggcagaagcaaagccccccagcctcacggtggcccggggccctgctggccggaagcgcaggccgtgcacacctcggaacacctggtggcaccggggtggacgctggccgctgcccaggagctgcagggcctcagtcagcaggaaatggagtgtcttgaaggagaagtggtggaggtagtgggcccgggagcggcccgcctcacgcacggctgcattgaactccttgtgcagggggctgttggctgtgtaggccaggagggccaccccatgctcatcgcggaagcccaggggtggcggggatggacgggtggggctgagactccactctggccacctggcctgacgctcctgccattggctgcttgccagtgtccagctgtctgcatacacctggttggcctggaactccgtgtggttgagatccgggagagcagctgtcatggcagcagcacagccagcgtactggtcatcaaaggaggccagggccatgtccagctgaatctcttgagagaagaggtctcgtcgtgtgatggggtggctctgggcctgaggggacaggagtagcagggactgagaggataggcccctgggagaatgagtcccctgccatccagctctcccctccactgagaaaggcaggaagggccccaaacacacctggtggggaaggggattgggaacctctggctgtaatttccccaagactagcatctggagctgtccccttgggctgagtgatccccaggggaagcgtcgggcattctttcctctctctctttctccctccagggttcagaagaagccgatggctcagttccctgctggggtgggaacagtgggggatgcccatacctgaagtgcttccatgaggcccacagacacaagaagcagagacatcatagcaggcatctgcatgctggtgaccctgggccagttgctgtctctttttgggtctcagtttcctcatct

SEQ ID NO: 986 - DNA, 1802 bp, Homo sapiens
ccaggaggacactcataaggacagggccccagccctgggagtggagggtgtgagcagaggccctgggactagggcctgggatggacaaccctccttactgaccctccagagtgcctgggagctgagggccggctggctctcaagctgttccgtgacctctttgccaactacacaagtgccctgagacctgtggcagacacagaccagactctgaatgtgaccctggaggtgacactgtcccagatcatcgacatggtgcgttgtggtggtggtacagctgtggagtcttacctgtcacagtgtcaagaaatgaaggggtgagagactgggattattctccatggaatttcttttctgtaaatgttaatattaacaaaggtagcagttacaaactgttgggtactgactgttgggtactgagtattgggtgcctacctcgtgcccaatattttgttcacctgaacttactgaatccctgctaagcagggattctcaccccatattcctgctgaggaaacaggggcagaaaagagaagagcccactaaggtcacatggcaaggtcaggtctgggtgggaactggacggtatggacaagtcaggtttgtgggtgctgaccagagccctgcaggggagtgtgcacagacagggcaggatatgcatatacatgtccacatctctgccattccctgcccccactaggatgaacggaaccaggtgctgaccctgtatctgtggatacggcaggagtggacagatgcctacctacgatgggaccccaatgcctatggtggcctggatgccatccgcatccccagcagtcttgtgtggcggccagacatcgtactctataacaagtactgcctatctgggcccctcctctctcttacccctctctagacttgcccttagctgtgggggtgtagtgatcccctctccctaccacataacctggttgccacgctgccctggaagcttttccccaggacccttctaagctgccaggcactcagcccctccatggcacccccactttaggctatcccaggccagcccaggctgaacgtctcctcggaacctactgtgtggtccagggcagttgtctgaatcacaagggcctctctagggcacacttttagctctaagtctctcagggctccccgaagagcctgtgtaagggtctctttcctccaggacatagccctctggaacactgctttatgtctccttgaccagttccgtgtctcccagccagcacatagctctgcatattttctctggggcccttctacaagttttgcagatgtcccccaagggaagtcactgtgtgtcccggagctacctctgggttctgcagaggcctttttatacatcctctggctacgtctgtgtcccttctgggcccttcaggcaccaccccttccaggcctcgaaaggcagcgggtctctctaggtgcactccaccctctgtgttgctttgttctgaaaacaagaatcaaattaacgaaaaaaaaacaagcacaagtttatttatttatttgagacacagtctcgctctgtcgcccaggctggagtgcagtggcgctatctcggctcactgcaagctccgcctcccgggttcacgcaattctcctgcctcaacctcccaaataactgggactgcaggcacccgccaccacgcccagctagttttttgtatttttagtacagacgaggtttcaccgtgttagccagggtggtctcgatctcctgacctcgtgatccgcccacctcggcctcccaaagtgctgggatcacaggcgtg

SEQ ID NO: 987 - DNA, 3310 bp, Homo sapiens
gtccaaggaaaagcctggaggctggtatagcacattccgtcgagggaagaaggtgagtcaccgaggccgagatggggagtgacatgaaaattgatgggaaccagcaggggggtttgaggggtgggttctgagaggtgagatgaagaggataggctttcctctaccttcctagggatcgcaagctggaggtggggtggcagcagcatcagatgtgtaacaggcagtcaattgccatacagaatgatggtgccaggataggggaagcacagggcatggtggaaatttagaggcagtgttggaaagaccagaaggcttcctagtagagatcacagctcatctgaagcctaaagaatgcactgtgttagcaagctaggaaggacaaggacaagtgttccagggagagggaaaggcatatgcaaaggctcagtcaagacagggtctggtgaatttgaagaagaaaaagccacatggctgggtacagtggcctgtaattccagcactttgggaggccaaggtaggcggatcacctgaggtcaggagttcaagaccagcctggccaacattgtaaaaccccatctctgctaaaaatacaaaaaattagccagacatggtgatgtgtgcctgtaatcccagctactcaggaggctgaggcaggaaaatcacttgagccctggaggaagaggttgcagtgagccaaaaccgtgccactgcactccagcctgggcaacagagcgagattccgtctcaaaaaaaaaaaaagcattattaagatattttgtatttttttcagattagctcttcaaaatctgatggagattttacatttatagtacatcacaatttgaatgctaaattttattgggaatatttgctctatatttagatttcataaaaccattgaacaacagttcaaaaagtagattcagactcaagttgttccaagcataagctttctgataactggattgaagctcagtcattagttgtgaatttttttaagtaaaagaattcagggccaggcacagtggctcacgcctgtaatcccagcactttgggaggccaaggtgggcggatcacgaggtcaggagatcgagaccatcctggctaacatggtgaaaccccgtctctactaaaaatacaaaaaattagccgggcgtggtggcaggcgcccgtagtcccagttacttgggaggctgaggcaggagaaaggcgtgaacccgggaggcggagcttgcagtgagctgagaccatgccactgcactccagcctgggcgacagagcaagactccgtctcaaaaaaaaaaaaaaaaattaaatgaagttaaaaaaaaaaaaagtcccagccaggcatggtggtgtgcacctatagtcccagctacttgggaggctgagatgggaggatgacttgagctcaggagatggaggctggaatgagccaggattgtgccagtgcaccccaacttgcgcgaaagagcaagatcccaacccttaccccccaaaaaaggaaaaaaaattaaataaagtaaaaaaaaatccctccttcaaatcagccacatttcaagtgctcaaaagccacgtggctattagacatgtggctgccatattggacagggcagaaatctggtatcagggacagtgagctctgtagatccagcgactcacaagagtggaggcagagttgtgtcttctgggtggggatgagtgtgttaaaaccctggattggtggatgaagcaatcagaatttgggaggtcagatggagtgggcatggaggcctactggatggagaggtggacagagtggatgttcaggtgactcttgggattctgccagggatctctaggtggctggtgggacctcctcagagatggtgacatggggggggtggcttgtctgccagtggatggagattccagggggtggcttctgcagaaagaggctcatggagcccctcatcctctgccttgccctcctctcaccagttctcctacgtggacgccgacgggtccccagtgaatgtcgtgcagctgaacttcctgaaactgctgagtgccacagctcgccagaacttcacctactcctgccagaatgcagctgcctggctggacgaagccacgggtgactacagccactccgcccgcttccttggcaccaatggagaggagctgtctttcaaccagacgacagcagccactgtcagcgtcccccaggatggctgccgggtaagagggtggggcagtggccagctagagaggggaggcaagatgtcggccaccttcccggtaactcaccgtctctgtcttctctggggacagctccggaaaggacagacgaagacccttttcgaattcagctcttctcgagcgggatttctgcccctgtgggatgtggcggccactgactttggccagacgaaccaaaagtttgggtttgaactgggccccgtctgcttcagcagctgagagtgtccggggtgggagggaccatgagggagccccagaatggggtgcatttggtgctgaggctttgaagccaccgtatttttcgttacctgtgactatggagccaatgggatgtgacttcgctcatcacggacagtcattccttctcctttccagggtgctgggggctggggttccctggcccaagggtccagcctcctctcaccccattccaggtggcatactgcagtctggctctttctcccctccctccccacccaagcctcacctccccaccccttgaacccccatgcaatgagcttctaactcagagctgatgaacaaaagcccccccacccccaatgcctgcctcctcactcctccgtcgctgcccttcacaccttttggtgctacccctccccagagttaagcactggatgtctcctgatcccaggctgggacccctacccccaccccctttgatcctttctacttccacggtgaaaggactgaggtcggactacagagggaagagggacttcccttgactgggttgtgtttcttttcctgcctcagcccagctctgcaaatcccctccccctgccccccacctccccaggctcaccttgccatgccaggtggtttggggaccaagatgttgggggggtgaatcaggatcctaatggtgctgccctatttatacctgggtctgtattaaaagggaaagtcccccctgttgtagatttcatctgcttcctccttagggaaggctgggatatgatgagagattccagcccaagcctggccccccaccgccaggccatagggcataatttgcatctcaaatctgagaataaactgatgaactgtg

SEQ ID NO: 988 - DNA, 495 bp, Homo sapiens
actgtaacctaaagcactgggattaagcagtgggagaaagccactgtgcccagccccatattgttttgttcttttgagacatagtctcactctgttgcccaggctggagtgcagtggcgtgatcttggttcactgcaacttccacctccccagttcaagcaattctcctgccttagcctcccgagtagctgagattacaggtgcctgtcaccacacctggctcattttgtattgtatttttagcagagacggggtttcaccatgttggccaggctggtctcaaactcatggcctcgagtgatccacccatctcggcctcccaaagtgctgagattacaggtttgagccaccgcgcctggccccatgttgttatttttaactggtttattttctcctggtttagtgggagctcagatgcccagtggatgggaatttagacaagcttggacttcccactgggcccggagtgcaagacttgatccctaaacaattact

SEQ ID NO: 989 - DNA, 7173 bp, Homo sapiens
aatgtgtttgtatgttttttttttaggagatcatgaatcagacagataaaaatcaacaagaaatcccatcataccttaatgatgaaccaccagaaggtaagtatgcatctgtaacactaagaatggaaaaatatactgaattaaagttctgatagtttttattttttacttattttattttatttttttttgagacagagtcttactctgtcaacccaggctggagtgcaatggcacgatcttggcccactgcaacctccgcttcctgggttcaagcagttctcctgcctcagcctcccaagtagctgggattacaggtacctgccaccacacctggctaattttttgtatttttagtagagacaggggtttcatcatgctggccagggtggtcttgaactcctgaccttagttgatccacctgcctcggcctcccaaagtgctgggattataggcgtgagccaccactcccagccctgattgtttttattaaagaaatataacctgtttaccttgtcagtaaatatgtccccaaaataattgaagataacatttttagcttctaataagaaagcatagatagtggtgaatagggacacaattttaccatataaggcataatattttgctgtcattcttcttttaagaccattttagaagtataagtatcctttcatttgtaaagggtgaggatggatacagaggaaggatggactgtgtttagttttgatatcctgcatacaaaatcagcctaatgcaagaggcattagagatctgttgttaaactcctattattcattatattgtaattggtacctctcctctattaacacatgatcttgggatctgcttcatttgtctttttaagtcataattctctttgagtttgaaaattgtgttatcatgaatcattttaattcttcagaaacccttggaaacacacctgaatgtcctgagtacatacagaaaatgactagaggcatgtttttggtatagactgttactaaacttaatccaaatagtgatctccttggagaattgcatgttgattactagggctggaggttgtgactctaggtattatatattttttcctagttctgttacccattgtctaaaattttcttcctatatttcttttattggtaggcaaaaatgaaattgctaggaaaatagcaacaaagggtttacacttaagccataaagaattcaaaagaactatcggagattgcagtgagctaagatcgtgccactgaacttcagcctgggcgacagagtgagactccgtctcaaaaaaaaaaaaaagaactagctgattaggtttagtttagtttggtggaggaatagcctggaaaattactaactcaggtcttttccatgccttacatttttaggtctggaaccatggagttttgaaaagttagggctcagtgagaaagttaacaaggactttgtgagaaagaaatcagaaaagggataaataaaggccatccaggggcatgattgtcaaggaagagaacaaagcagaatgtctttctatgccaaccactaaacaagaggaatctgcaaagcagataatttatatggtgataattaagagtatactgtaataaaagagatcagctgcattaattatttatctgacttgattaagaacaattatttgtcttctttaaatgcatgtgtaccaaatttggcatggcaagatagttttactaatgagatatttggcatgaggcagttatctgttgtagcctcaaatcaggattttgccttttttcttagggctagtgacctcgattacagaattaccaattatgtaatcctttccatcataattttataactaatatattcaaatgcccatctatatattaagtcttttacttcagtcattaaaaatttgtattaactatacttattaagtagttttaataaaaatatttggtttttaaagtttatagctattgctgtatctgtatttatgcactattttgcaaagatattttgactagtcagtgagattttcccacttgtgataaaatgtaaaatcttcagacaatgaaaagaaaaattatctcaaggtaaatttgtgccttgtgcattggaaagctcagttttcagaattttttattttctccatcaaatattgtcagtttccccatgataccttctctgagaacttgattctgctagaatctaatagttttggtgctcttagttggacttacgtacccagtaatttacccctctttttcagaagtaaagcttgaattgtgtaagtaccaaatatttttccatgaagtttagaaaaacactaatgcttatgtgttgttgctgcttaaattattaggttactaggccgggcgcagtggctcacgcctgtaatcccagcactttgggaggccgaggtgggttgatcacgaggtcaggagattgagaccatcctgactaacacggtgaaaccctgtctctactaaaaatacaaaaaattagccgggtgtggtggtgggcacctgtaatcccagctactcaggaggctgaggcaggaaaatggcgtgaacccaggaggcggagcttgcagtgagccaagatcacgccactgcactccagcctgggtgacagagcaagactctgtctcaaaaaaaaaaaaaaaaatattagattactaaagagaaaagacctgtgttcactgtgttcattttaagctagtgcaaatttttatgaaatctttctgctagtcattttattcctaagtttgagcttacatgctaatatatgtggctctatttaaaaaaaaaaaacaaagaaaataaactcatgacttagagcttaatttttcatattgctattgccttttatgggggatatctctagtttttaaaaactagatacttaaagcacacactctctttcataagaattactgaggcagtaattttaagtgttaaccatatctatagtttctctatcctacttatgtctgaataaaaatgattttttaggtagataacacgattttaaatgatgaatagttttttacttttacatagtattagctctttaaatacgtcagtaagggagacatagagcagagacccaaatgtatttacttaataggggttcttaaactttttggtttcaggatgcctttacaatgtcaaaaattgaggccccaaagagctgtgtctttgtcaatatttaccatattagcaataaaaactgagaaatttgaatattttatgcattaaaagaacccatattaacataattaaaatatttttatgaatagtaattctttcaaaacaaaaaaaattgtggaaattgtgagcaaggtgatactggtttatacattttagcaaatctctttaatgtttggattaatgcaagacagctacattcttgcagctgcttctgcattcagtctgttgtattatacatcattctgcttctggaaaactgctatagactcatgacagaaagtgaaaagacaaatgatattttaataatattatgaaaatagtttttaccttgtagaccccctgaaatggtcttcggcatctgtagtggtcccagaccataccttgaaaactactgcattttacgaagaagattgtttcggtaatgactgattaaatcctatcaaggaaatgaaggccaaatgtagttatctttttattttttcatgttccttttaggatgtaaaataaaggttatttgttaacaaaaccgtaaaccaaggaaacatttaaaataggattctgttttacaaaagttgtctagtctctaaagcatttcttctcatagatactaagacttagcattggaccaagatattgtaaaaacatgtacaactataccctgaaggaagagctcttcagtgtctttgaatcagtgtggttggccttatcaaatcaacctcctgttgtgaggaagtcttaggttacttaatgatgtgtactgctcttttaaagacttgtgacttatatttgattgtctcatgatattttctctcattaggttcaatgaaagatcacccacagcagcagccaggcatgttgtcccgtgtgactgggggtatcttcagtgttacaaagggagctgttggtgccaccattggtggtgtggcttggattggtggaaagagtctggaagtgaccaaaacagctgttacaactgtgccttccatgggaatagggctggtgaaagggggtgtctctgctgtggctggaggtgttacagctgttgggtctgctgttgtaaacaaagtgcccttaacaggaaagaagaaagacaaatctgactgaaatatagagatacacttgcgctccacagcactgtaatgccagtggcattgaattgctaaattatggactacaaccaagtcaactgttttggacgtttatcttctaaactgctgtgttgaaagtattgatgactggctttcatctaaaaagaagagaccaatacgagcacagtatatgaaggtttctcatacttaagttccaggtttttatctggtaaaatgttacacttactcggttgtaactgaagatatggtatgtttgaatatttactataagtctttcagtttgactaaaaatgtgaaagttgaatttagtagatgatcttcacagttccatatgtataatgtgccaggtaactcacctgccccttaagaagggaaccttgaattacataagccgtacctttgatgtgcctaatagtttcagatgtcttagttttttataaccatagttgattaggccaagaggcattcatttcttatttaagctggcaaaattagcaggaattagagaagtttaaaaagataaatggttttatgataatgttaaccatcttttgttagtaaatatgcgttctattattttaatcattgatgccttacaaaagaaaacatcttttctaataccctgaatatgtgctgttcttagaatcatctatggattcttttaaaggttgtttgtgaaattagttttccctttttagaatctcaggagtagtggggtaaagacatttcctgctgtcagtggataagacagagcttgttaactgttttggcagtagttaaaatcaaattgtacacttctcagcctgggttcatgcttcatcattaatacacctcacagtgcctaaggaacatttacttactggtcagaaggtattttggaagagtttcatattaaggaggaacaaataataattttaagttcttaaaaattacctaaaacaccccaaatataaaaagaagccttcacacctattctgtctttaggatgtcttaaattattagcagtactccttttttaaaaacactgtaaaagtaaccacaaatatgtgaggacttactattttaaatggaatggaatgagctccatagattagttttgaatataaagtatataaaagtgcatcagtggtttatataggctttaaaaacatgttatcttacagtcctttaaagcagccatagagtttgtatcatttttcaagccaatttcagtcagggatttgaattgtttgattatggatgataaatgtgtcatatcttattaatatgtctcatgtctcgttccttcttaatatgatttagctggaattcattttcttttcgtttcatgtttaatttcataaaacgtttaacaattggcatatatacttggcattcctgtccaccaaggattgtaatccaagcctgggaaaatcttaaatttctttttacttaaatctggaaatttgtctccattctgccacctttttttttttttttttttatagtggaggggaggaaaggggggtgataccttgcagtaagtaagtcgaaatagcatgcctgaaaatttgaaacagaccattctaacacccaaggcttgtttataaaatacttgagaattacattaatgtggaatcaacagatgcagaagaatataacataacttttaaaagctttcataaataccagcagcaattgtaagcaaatctacaaaggttcttgaacctttctattatatacaaaactgaaaagtcattaaggagttcaactaatcaggaattaaatggtcatttatttcatgcagtatgatttaaggtatttcttgagattctggtcaaatgtcataatcagcaaacgggattaaaaaaaaaactccaaaatcactaaataattatctaaataatggtattggagaacttgtttcctgctatttggaagagattgttgcttcattgctagtttgtatttctaacttctacagttatagactccactgtgctttgtgtctgaatttctcagtatagacattttgtttactgtatgcttgcatatttattttcaactttgtttgtctttaaaattgcttgaggaaaaatggttgtaattaatttctgctacagaaaagccacctggtacgttttgtctcatcaggattgttttaaattctaaactataagtttgttcagaggggcttttgcaatgatagcagaaaactgtacaaatgtacagttagttatagaggttcttgttgaaatgaacttaccatctgatgatatgtatgtacagctgtgtacttgagtcttttttagtttacttagaaagactagcagtttgacctgttaaacaggactagttcaagtcaagaaactaaggttgttgtatacacctggaggcatctgttattcagcttatcctttgagtgggtatttggcacaatgaggataaacttatgtgacccacttgaatggctgatctaataatgttgacattatgcattctgtacttagtgaaatgtcagatgaaaataactgatgaataatttttttgtattaaagggatgggaaaagaacacatgaatttgttaataaagcactatgatctgcaaacgatggaatgtttcataaagatctaaagaaataaaggaaactttaaaacagggtgatcttaccatttttagttactttgcagttcagaaagtgctgtagccagtttaaaattttttttatagtaatgtacaaacatatctttggatatgtattttgatgctgacacaaccatgaaatacaaatatattttaagcaactctaataataaagattaagagtgtagatttctaggttttaccccaacttgccaaatctctgcaaggtggggcccag

SEQ ID NO: 990 - DNA, 18564 bp, Homo sapiens
gtttcagtgatgaacgccctctttgggcgtccccggataccgcctgacgtagtgccaatcacacctctcgcgtctcggcgcctcggaggctaatgaggacgcctggcgaaacgcagtaacggatttccgggtggaccttcgctttacggctcgtgagttcttccgcccaacccagaggaagcgggagagcagtttacgacagcgccggtcgtgtttacggcggcgcccgctgcgcgcgcatgtttcctcttttcctggtttctcaagagtgctgctgctaacgcggtccccggcacgcaccatctgttgccatcccggccggccgaggccattgcaggtgagcggcgtgtttcataggttcctgcggccctccggagccggttcggactaggtccagccttcggggggcctcccggaagagacctctcttagtcccttcctgctgttgccgtccctccgctgggcggggcaggaatccactttcgggggccccgcgtcccgcacgctactgaacgcgggacacgaccttgtgggtgaggtccttggccctcggccctgctcagtgcccatgagctgggtgaatttgattgtcacttaactcacctgggttaagacggaggggtaacaacaaagtctttctgaagtggccgaaaactccctgactttttgagtgaggtcttaggggtaccaggctgagcggtgtttggcccctgttcttaggaattcacagtgcataggttatctttccttttttgtgaaactggaggctaggatagagaagtagatttgatctctgatcttaaatctaccccaccccctgttcagcgatggacggcttatgatctgtagtggcctgccaaccacagagccccttctgagtgccctcttggaacctccctatcctgcccctgtgactagtacagctgttacttcgtttttgctgagcggctcagtttctcctcctggttccgctctgctcttaaaaaaaaaaacatttattaaagccagggtatctcatccctggctttccagggaggtgatgcaggtcgagcctcgggcctcttcccttcttgagcttctgacagaacccgattttttaaagtgtgttttgagactcgttgtcttggtattatgatgtacggtctcaaacccctgatctttgcgggctgctgcccagctgtaatataatggaaagaaggctggactgacagcaggcaaccctggaaatcaaatctgttttgaaatgatgaggtcagctgcttgagtaggctgagcttcaaatttttgcctctaaagtaggggtgggggggtggtcaatggtgttaaattatctggtatagggcctaacacgtaggagctcagcaatatttatttaatacaaattgttctgagaccaccaccctttttcttctgtcctcttcctatagtttctattagaaagatgaaacttctaggttcatcctgtgttgctgtcacccaaatgtcatctctgaaggaagcctcaatctccccagcatggggctttgaggagagtttactaagttcagcatacctgttcttttgattgctctccagcctccaagaaacatttgatttttgtttttttgagacggagtcttgctctgttgcccaggctggagtgtaatggcaggatcttggctcactgcaacctccgcctcctgagtagctggtattacaggtgcccgccaccacgcccagctaatttttgtatttttagtagagactgggtttcaccatgttgaccaggctggtctcgaactgctgacctcgtgatccgcccacctcggcctctcaaagtgctgggattacaggcgtgagccaccgcgcccggcctccaagaaatacttgtgtagtgaattttcctctaggaactcgccttctaagcattttcagaaggttacaacggaagataaatgcataggtttttttatagaagtgtcgggcagccatctgctatacagcgccggttttttaattcccaagagggctatagcattatgcagagtgcagactctggggtcagactgctttggttcacgtttttcatccactagcatttcaactttgggcaatttcttcatttctctgtgctttggttttcttatctggagagtgcggataacattggctcctacctcacaggattgttggcaggactgtatgaatgaatgagtggtaaacagtaagaacagtgcctggcagtattcatgaacatttaacatggcaactttgggcctgaggtctgtggggacctccttggccctctggcagttcttctgcctggctttatgtccgcttgcactgcacacaggatttgcgttgatggcagaaaattgaaacaatgagaaaggaaaattgaatttcaggatatacttaaagatctttttttctcagcactctatatacataaatgcacttttgcaagtctgaatacttgtgtggcattatacaaagtgcttagaacaaggatcttgtttattttgcagatggaaaagactaaggtggctggacgtggtggctcacgcctgtaatcccagcactttgggaggtcgaggcgggaggatcatttgaggtcaggagttcaagactagcctggacaacatggtgaaaccctgtctccactaaaaacacagaaaatagccaggcggcgcttgcctgtaatcccagctactcaggaggctgaggcaggagaatcgcttgaactcggaaggcggaagttgcacgccactgcaccccagcatgggtgacaaagtgagactctgtctcaaaaaaaaaaaagaaagaaagaaaagactactaagtcttagggaagttgagtttgtatgaattggtgaaggtatatctcagaaccaaaacaaggttactatatttgaaaaaacattaggacattttatcaaatctgacaccattaaatttttttaaacacttatgtaacacagaaaaagaaaaactaccaatcaatacaacaccctgtcaaacacaaggtgcagcctcattttaaagatgttacagtaaaaagagagtgtcgtggaattaatgaaatatgaaaaatcagttttgtttgcattcttctcagttttaagtacatattcacagtataattaacaaaaacagtagtagtcgctcaacagttgagggttccattttgcgtgttgctttttgagttctatcatttatgtctttgcttacttcatatggagggtgttttgtactctgaggccttcgttcatgccgctactcacatgatttatatttttcagattttggaagatggcaaagttcatgacacccgtgatccaggacaacccctcaggctggggtccctgtgcggttcccgagcagtttcgggatatgccctaccagccgttcagcaaaggagatcggctaggaaaggtacatgcctgtcagcaggagtctgaatctttgcagctgtggctgctactctcgagtccctgtttagattttattgtctcaaaatcttaactcctgaatttcttatagggatgccagctgagaaaggttatctctgggtgtagtcatagaagagctgggcacttacagaggtgttgtgaacaaattctgagactcttccacgctgtcctctcgcgctcagggatttctggttctgcagaaacttgcctggttgacctgtgcattctctgtcttttcttgttcttcgtaggttgcagactggacaggagccacataccaagataagaggtacacaagtaagtgtttctgcaactgaatgccccaatcagggccttgggaaagttgttctttattctaatgaccttcttctgaaagctttttagaatgggaagaaactgccaacaataattcataacttttagggatgtattctgggctttaacaataaccacatttttggaaatagccctcaaaacttagaccattcattaaagaggtctagcctattaaaatggggttttgggcccttttaaaaacctgttgaaaacattagctgggcgtggtggcgtgcacctgtaatcccagctactcgggtggctgaggcaggacaatcacttgaacccagaagttagaggttgcagtgagcagagatcatgctattgtactccagcctggtgacagagccagatcctgtctccaaaaaaaaaaaaaaaaaaaaaagtaaaacccctggttttaagatcctggtaccataaaaaggctttttctctctgccacttcagatagttggaggtggctgcctggagaactaagttaggatagctgaggctgagattggcaagaaagtatatcgtgatctattagacatacctgccatgggcccctgataatggagatggtggttagcaataaatacctcagattctcacacaataacgcagagagtgaaatgggttagtttgagtccttcagattcttggcttagaaagttctttaggccagagttgttcaaaattgaatgtgcatatgaatcatccggggatcttgttaaaatgctggttctgattcagtgggtatggggtgggactgtgagtctgtgtgtctaacaagctttcagccaatgctacaggtctcaagaccacacttgaaatagcaaggctttagactggtgcatatctggtaaagtctgtgggtgcagttactacatgccatcacctttgcctccagataagtactcctctcagtttggtggtggaagtcaatatgcttatttccatgaggaggatgaaagtagcttccagctggtggatacagcgcgcacacagaagacggcctaccagcggaatcgaatgagatttgcccaggtaggccaagagccagcaaccacaccatcttggggctgttactgttggccatcacctgctaaaaaatgctaccttgtgactcctaatgagagagggaagcatattataggtcttttcgtgaatctcgggtcaccgttccataacaagtggtaccaaggtgaacttgcactaggatcagggatgcatttaaatagtttatatttctgtttgccagtagctaggacatcagacttgtatgctaaaaacatttgtgctggataagaaggtgcacctgtgcctgttaccacacttaattgctgtgtgcagactttattaagtagatggtccagtcagattgcctattattatttaaagaggcaaactcagaaaatctaatgagacccagtaaacatacttcaatgaaaaatatatcatgggagtataggtctaagcaaagtccaagcacttaccccctaacacccccaagctgttgatgccgtagagtgaaagcacagagtaagatgtgaaacttgggatttggcatcctaaatttactccaaagacctcccacttgttctgcctattgtgagccaaatctccaagattttaacatggatgtttcttgctgatgcccagaggaacctccgcagagacaaagatcgtcggaacatgttgcagttcaacctgcagatcctgcctaagagtgccaaacagaaagagaggtgagattttcatcctgctggaacaagacacccttcccagactggccgtatttggaaaccacaggaccaaagcaggaggatggttgtattccccaccactgcaaaaaaggaaaatactttctacaaccagttaagcccccttttagcttgtcgttctcaggctggttcatggcagatagcatgggcaggaaactaactccttgtgctggtcatgcgcactaaagggaaacacaggcaggcaagaagaggctctggagcttacctgggctcagttctgctgtgggtcaactctaggaagccccctgtatgctggtcctttgagcctcctggtgttgtgtggtccagcggccactacaccccagattggaactatcagtgaacagtcactatagatgaagtaaaatcatctggtcagtatttggaggcagtgtaccttttctaacacctccagtatgcaccgtctgggtctcttcctttctctaagcccatttttcgtagtttaaaggagttagtggtgatggtaaggtttagctgaagagaatggcagcgtgtgccttttgaagaagccactggtttaaaggtctgcactgagatcatatgtctgtctttccagagaacgcattcgactgcagaaaaagttccagaaacaatttggggttaggcagaaatgggatcagaaatcacaggtaatgtatttataccagaattctgccttggaatttggttctgtttatttggttgtctttattaatagcttagatgagatatacttcacataccgtacaatttagtggtttttaatatatttgaagagttctgtaactggtcaatttcagaccattttcatcaccctcaaaagaatcccttaccctttagcagtcaccctgtcttgatctgttttccgttgctagaacagaatacctgagagtgggtaagttataaagcggtttctttagctcatggttctggggactgggaagtcccagatcaggagccacatctggtgagggcctcatgctgcttgatagcatggcagaaaaagcagaagcgggagcagggtgcaacagagaaaagggctaaactttgggtagttagcccattcctgagagaagggcatgaggcatttattccttttaacgacctaatctcttaaaggccctacctcccgacactgccgcagtagcaaccagattgccaaatgaattccaggaggcacacccaaacaccagcacccccagtagcccagcagtaggcagctatgaatctgttttctgtctcgggattttttgttctagacattttacataaatggaatcatacaatatgtggtctttagtaactggcagcttttatttagcgtgttttcaagagtcatccatgtggtagcatgtgtcggtacagttttccttcagtatatgaaagtctacacattctcaagtcccacattcggcctgtggtagccacatatatgaaaagtcggccctccatatactcggggtttgcatcccaagaatactgttttctttttcttttcttttttgagacagagtcttgctctgtcacccaggctggagtgcagtggcatgaatcttagccaactgcaacctctgcctgctgggttcaagtgatcctcctacctcagccttctgagtagctgagactataggcatgcaccaccacgcctggctaatttttgtattttctgtagatagggggttctgccatgttccccaggctggtctcaaactcctgagctcaagcagtccacccacctcagcctcccaaagtgctggggttacagccatgagccactgcgcctggcttgtattttcaatccatgtttgtttgaagaaaatctgcatattaagtagacccatgtacttcaaacccatgttgttcaagttcagctgtgcttcatctgttgttggtttttttggtttttgttttttgtttttttaagatggaatctcactctgtcacccaagctgcagtgccagtggcgcgatcttggctcactgcaacctccgcctcccgggttaaagtgattctcacacctcagcctcccaggtagctaggattacaggcacgtgccaacatgtctggctttttttttttttttttcatatgttttgtagagacagggttttaccatgttggcccggctggtttcaaactcctgacctcagatgatccacccacctcagcctcccaaagtgctgggattacaggcgtgaggcaccacacccagcccagatgagcttcttttcttgtttattgccaaataagagtcctttgaattatacatcatgttgttttgagccattcacatgctgatgaacatttgagttgtttttcactttttgactattattgatgctgctgtgaacgttcacctgcgtgtgcttgtgtgggcattctgagaacagaacacatgtaagcaaaagtgaagctacattttgttggatatgatgctgtatcaagaatagttaataacccgagagaaatataaaggaccttctacatgttcatcaggtgacatcattacctgggagtggaaccccatttgcttttgaacttttgatccctttggtcctcttccacaccataaattcctgggagtcagggattctgtcttataaaacagtcagcactccatttattgaataaaagctctttttcttttctctcttttattgagacgcagtcttgctctgtcacccaggctggagtgcagtggtgctatctcagctcactgcaacctccgcctcccagattcaagctgttctcctgcctcagcctcccgagtagctgggattacaggcatgcatcaccatgcctggctaatttttgtatttttagtagagatggggtttcaccatgttggacaggctggtctcgaactcctgacctcaggtgatctgcccgccttggcctcccaaagggccactgagcccctccgttttatgtggttgttgtttgagacaggatctcgtgtcactcaggctggagtgcagtagtgcaatcatagctcactgcagcctcaaactcctgggctcaagcaatcatcctgccccagcttcccaaagtgctgggactacaggcatgagccactgcaccaggccagctcttcatatttttagcctgtcttttatttatgttttgtatggactataacttttttttcctctaatggttttcaactgcagaaaccccgagactcttcagttgaagttcgtagtgattgggaagtgaaagaggaaatggattttcctcagttgatgaagatgcgctacttggaagtatcagagccacaggacatgtaagcagcatcttttactactttctacactgctcttatgtgtgtggaccagctggtgatgggtattttcttaagccctagtatttccaaaaaggctttgaagccacttactcaaaacacatttcataaggttaacagaggtatttgaaaaaaatcaagaccggccaggtgcagtgggtcacctgaggtcaggagttcaagaccagcctggccaacatggtgaaacccagtctctactaaaaatacaaaaacttagccgggtgtggtggcacacacctgtaatcccagctactcaggaggctgaggcacgagaatcacttaaaccctggaggtggaggttgcagtgagctgagatcttgccattgcactccagcctgggcaacaagagcgaaactccatctcaaaaaaaaaaaaatcaagaccaaggggaaaagcagaagttcactgactgcaaacttctttttaacttcctggtatcctgaggaaagaagaaatgagttatacaactcttttggcagaaagagaaagcagaatggaatttgctgattattaaactgtatatttctgtttcctggcatcctgagcaaaagagcaataagattaagttataaaactcttgtcaggaaaagaaacacagcaattcttcaggaggaatctttgcttctcctgacatttcaaatagcttcttacctcaaaggacaagtaggtggaatttaggtagtgggaaaccagagcaccagacgagaagtcagcctacccaggtgcttctataactagtcatctcctgtcttagcctcggtcaccctacctttaaaatgggggcgttgggctagatgagttgtgcttgctgtgttctatgccaggtgttaagtggacaggaactgagcaagcactgaggattcgtctctcctgctctggccagagattgctttccacctcttttagacttttggataagacttctggatgtatggcttaaaagaaaaaactgggggttatctctcttactttgcatgtctttgcctgctcttcccacagtgagtgttgtggggccctagaatactacgacaaagcctttgaccgcatcaccacgaggagtgagaagccactgcggagcatcaagcgcatcttccacactgtcaccaccacagacgaccctgtcatccgcaaggtgtgcgcctccttctgcccctctcccccttgttaggaatgctgtcggcttctacagctgaagctgcagaaagaacagaagacatgggaataacgtatgtattataggtaaaagcactttgccaggtagaccggaaatgtggatgttaagcacagctggacttgaagcccagttctgccgcgcttcctggcttagtctctggagccttagttctctcatctgcaacaaggggtagatgtacatagcactaccactggggcaaaggtgaaagcatctgaagcacttggctggaatctagcaggtgcttagggtgctgcagtgccactgccacccgaaacttgctggctcactggctgcagtgtttttggtcaatgaggtggggcctccttattaaggatttatgtggtcagcaaaggagttctttcccatccatgtgagtgggcagtgagacctgggagtgtctttccatcttctctctttgatcctctttgcagctggcaaaaactcaggggaatgtgtttgccactgatgccatcctggccacgctgatgagctgtacccgctcagtgtattcctgggatattgtcgtccagagagttgggtccaaactcttctttgacaagagagacaactctgactttggtaagaagcgtgcctggggagcaactcaaaggcattgagtatttttgttggtacagaacaagtctctggtactagagaatggatagaaagtggtctgtcttcccaagggaattgacagcagcagtgtctgaatctcccacactctttagaggttaggagaagagactgtcactgcagtacctgcttgaggcctcagcttttggagtcctcacagcaccctaatagcaagcttccaaatgttgcttttttgttgtttttttttttttttaattgagacagagagtctcactctgtcacccaggctggagtgcagtggcgcagtcttggctcactgcagcgtctgcctcccacattcaagtgattcttctgcctcagcctcccgaatagctgggattacaggcatgtgccattacgcctggctactttctatatttttagtagagacggtttcaccatgttggcgaggctggtctcgaactcctggcctcaagtgatccatcagccttggcctcccaaagtgctgcgattagaggtgtgagccaacacacctggcccaaatgttattcatttaaatacccctttttcgacttttgccatcttgcataccttgttcagtgtttgcttactgtatatacatatatattttttataccatacatatatgtatttatacaccataaaggaaaaccatgtcactcaaaaattaacaaaacaggctggacacggtggctcacaacctgtaatcctgccactttgggaggccgaggcggagaatcacttgacatcaggagatcgagaccaagcctggccaacatggtgaaacccagtctctactaaaaatacaaaaattagccaggtgtggtggtggacacatgtaatcccagctacttaggaggctgaggcaggagaatcgcttgaacccaggaggcagaggttgcagtgagccgtggacacaccactgcactccaacctgggtgacagagcaagactccatctcaaaaaaaaaagtgtttatattctgagcctgaagcctgaggtctttattaaaaagcttgcaaaatcattctcttgaggaatccaaaacgactgaaaagggacagcttcgttactgtgtgattgaattgaatgttggacagtatcttgagttatcctggagcagctgccccactcccccgcttatgtgttccacaccagggagacccactttaggagagggcagttctttgaaggaaggacttgtgttgtttgcctctccacatctccccacagcgctgcgcacattgtcagtgactctttgttgcatggtgagtgaccatgccacgcttttgcagacctcctgacagtgagtgagactgccaatgagccccctcaagatgaaggtaattccttcaattcaccccgcaacctggccatggaggcaacctacatcaaccacaatttctcccagcagtgcttgagaatggtgaggaaacgagtctctgggcattgattcattcttatttaatcagctgctgtttgtggagcatctgctttgtgctaggctcttggttgtgggactgagcaggtcagacgcagtccccacctttagcaggggagttacatgcctgggcttggatgttaggctctctgactttgaacaaagttcctgcccttacagaatttaatgatagtggaggaggaaacacagtgaacaataaataataaattgatttacatcaaatggtgaatatatgccatggcaaaaaaatgaagtagagatgagcatggttactaagtcattgttctaattcatcaggtgctaacagttgggaggggtcaagtaggcacaaaacaggcagcgagctcagagccccatcaagggccccaggaacctggccagggctgcaactaagcagaggtgctgggtctgactgattggccttggccttgtcaacaaagttagctctgtcttgtgacacctttgtttttgcaggggaaggaaagatacaacttccccaacccaaacccgtttgtggaggacgacatggataagaatgaaatcgcctctgttgcgtaccggtaggtcacctctctggtgggtattgtggccagactggagcacgggccccactctatagaatccccagtgaccacatgagtttcttttttgctgcagttaccgcaggtggaagcttggagatgatattgaccttattgtccgttgtgagcacgatggcgtcatgactggagccaacggggaagtgtccttcatcaacatcaagacactcaatgagtgggattccagggtgagccgccatctccatcaccctcctggtgacaccatgtctctattccctacagtgcctgtttacgcaggctaggttgtataaactgtttcttatcccctttcgttacttatagagctacctggatgtttttttttgtcttgtgagttttttcctctgcttagttccttgctgagaaagagcatgactgtgtgtgtagaactatgttaagtgttaagaacttttctgcttattttttacgcaggaaccagttaactcccttcttccagtactttcttcatctctgttccattgtggcctcctgttgacttctgctccctgagcatctgattttttcctctccttattatctgggttggcagttttcctgtaagtctggccgctcttctttttgacctcttctttcattgactgagccactgccttcaatcttttcacacattttttgcaattcctcatttctttaactcatggattctaagatctggctcagaattgactcttcagaggcaccttgaaagaaacatgcttccttcacttttcctcctctatttccaccccacccctcccaatccgcccccccgcccacatcacctgttgaaagagcacactggaaggtttgccgctctggggccagcggccttttcttggatttttcctggtgagctccccaaagcattcagggccgtcgtgcctgtgtcgttttgccgtctgtgttaccgcgttactctggtctcacccgtttccctgttccgtttgcatgtcgtctttgctggctcccctcctttttgatcccagtggagtcacctggacagctctcttcgccatacatacttctgtattatataactttgtattagttttctttcgcaccataacaaattaacagaaacttaatgacttaataccgatttatgtattttacttttattttttattttatttttctgaaacggagtttcgctcttgttgcccaggctggagtgcaacggtgcgatctcggctcactgcaacctctacctcccgggctcaagcgattctcctgcctcagcctcccgagtagctaggattataggcatgcaccaccacacccagctaattttgtatttttagtagagatggggtttctccatgttggtcagactggtcttgaagtcccggcctcaggtgatctgcctgcctcggcctcccaaagtgctgggattacaggcgtgagccacagcacccggcctaacaataccaatttattagctcacggttttgtaggttagaagtccagtgctgtgtgcttggtccttgtattagtccattgtcacactgctgtaaagaaatgcctgagagtgggtgatttataaagaaaagaggtttaattggctcacagttctgcaggctctagaggaagcgtggctgaggagacctcaggaaacttgcaatggtggcagaaagcaaaggagaagcaggcacatcatggccagagcaggagaaagagaggggggaggttggtatacacttttaaacaaccagatctcttgaatactcttaccacaagaatagtgccaaagggggaagtctgcccccatgatccagtcacctcccaccatgctcctcctccaacattggagtttacaatttgacatgcagtttgggtggggccacaaatccaaacaaggcagaaatcatggtgtcaatagaaatagaactgagttctcatctggaggttctgaaagaaaagccacttccaagcccattcttattgtgggtaaagttcatttccctgcagttagatgactgaggcccccatccccctgccagttgtcagctgggagcctctcttggctcctagaggccacctgcattccttgtcacatggccccctccatctccaagatagcaacagcacatcagatccttcttgtgcttcagatctctgacttcctccgtctccgacctctacacctagatttaagagactcatacggttgggtgagcccagccaggtagtgtatattaaggtaaactgatttgcggccttacatctgcaaaatcccttttgacatacaaggtaggatgatcatgggggtgatacttgatcctagccataggttctgcccgtagtcaaggggaggagactctgcaagggcaagggtcactgggggtcatcttagaattctgcccatcccaggcctcaaccatgaactctttgaaaatgatttctcaaatctactctgatttattatacttcccattgtttttctgctaaaacaccttccccttccatgtgtccccagtcccgtcattgcctctgggccagctgtccatcagcattgtctttcttccacctaagctctgagcctccaacatctccaacttcttttttacattattctgttttgctgttagcaaaatagaaggctttgctgtcttctgaatctgtcctggatttcactgataattgccctagttcagggccccatttcatcatgcctgtttgacatttgtctcctaactgatttctctacctccacccaacttctatatttgatttatctccgccagtcaattgtccaatacacgcttcatcagcagtgcagattgggagaagaattctaacatgccccagcaagctgtatgcagtagtatgcacctatagtcctagctactcaggagcctgaggtgggagaatcgcttgggttcatgagttcaaatcctgaactcaccagcttgggcaacatagtgagaccccatctccaaaaaatgtgccacagcaaactcacaggagtgctgcaggatattttaaattttttagggaaacacagagacatcttgtcagaatactaatacatggtttgaccctaactaaataaaaggaattcttggccgggcacggtggctcacgcctgtaatcccagcactttgggaggccggggcgagtggatcacctgaggtcaggagttcgagaccagcctggccaacatgatgaaaccccgtatctaccaaaaatacaaaaattggctggacatggtggcgggcacctgtaatcccaactactagggaggctgaggtaggagaatcacttgaacccgggaggcggaggttgcagtgagccaagatcgtgccactgcactccaccctgggcaacaagagcaaaactccgtctcaaaaaaaaaaagaaaaaaaatttaaaagaaattcttgagtatttcttttgccctgtgtttgccatgaaccaagaaagtttgggaacctctgtcatgtgacctttgaccagtcatttcactctgggtccaacttcccacgtctacaaatgatatgggtagaaaagaggatctctctggggtccttttctactgtgtgtgcatttatgtaaaatgtcagactcagctttgcacccactgcaggcttccacccccatctaaggccaactctgcctgtctttcctatcccaccatgcctctcagatcaagacctcctggctacacctgcacttgagccaatattctccacttggctcactgttacacgtcctctgtgaagcccttccttaccacgcaacacatagtaaacacttggctctgctgtttatatgacacttctaaagtgtgtgtgtgtgtgtgtgtgtccgtgtgtgtccatccatcattccctgtctaggcgagcttttagaagagaggaattgtaagtcgttgagtgactgctgtgcggcaggctgtgcaagggaagggactatgtctttgtctcttaaatggtaagatttagtgcgtacctacccactttctaagcaagcagactagggagttccttctctgccagaggaggtcccagcaccttgggcatttggagcttgcttctgtttctctaacggggctctcctgcagcactgtaatggcgttgactggcgtcagaagctggactctcagcgaggggctgtcattgccacggagctgaagaacaacagctacaagttggcccggtggacctgctgtgctttgctggctggatctgagtacctcaagcttgggtgagattcctgtgcaggagctggcagctgatcttgtgaaaggaagggtctgggtagggaggttgaccctcccctccccgtgtactggacaattgactggcagagataaatccaggggtggggtagagatggaggggtcagttaggagacaaatgccaaacagcaggcatgctgaatggagtcctgaactagggcaatggtgtcaatgaaatccagaactgagaactcagaagacgatgttttccctttcccttgaaaatagcagtggactgccgggcgcggtggctcatgcctgtaatcctagcactttgggaggcccaggctggcagatcacgaggtcaggagatcaagaccatcctggctaacacgatgaaaccctgtctcaactaaaaatacaaaaaattagccgggcgtagtggcgggcgcctgtagccccagctactcagggggctgaggcaggagaatggtgtgaacccgggaggcggagcttgcagtgagccaagatggcgccactgcactccagcctgggcaacagagccagactccgtctcaaaaaaaaaaaaaagaaaaaatagcagtggaccaggtatcaccatttaattgacatttgatcccaagtgttgctgtctctgtgctgccctgctctgaccactgatatcccttcccctgttagttatgtgtctcggtaccacgtgaaagactcctcacgccacgtcatcctaggcacccagcagttcaagcctaatgagtttgccagccagatcaacctgagcgtggagaatgcctggggcattttacgctgcgtcattgacatctgcatgaagctggaggagggcaaatacctcatcctcaaggaccccaacaagcaggtcatccgtgtctacagcctccctgatggcaccttcagctctgatgaagatgaggaggaagaggaggaggaagaagaggaagaagaaggtgtgtagcagcccactttctgaggtctagagtgatctgtgggctagcacgggagcaagctctgtagccattgtgatctttaaccttgataaaacttcgagaattccctgagacttaagtatgaagaagcattcactttggctccaagagcttcttctagagcctttagatcacatcaagtggttggggaggatagcggtgttttagagaagcggctggactgtggcagaggtagaggaagatgagggaagtcccagattgaagccggtggtctagagggaaaagctccgctccgggttaaatagcctgaaagttgtctctcctgctccaccagctggtgactgaaggaaatacctgcccagccctgtgagcatctgaaaggcttaacttcggaatggaagtgttgaaaactcacgcacagtccagcagaggttcagaaaggaaagtgaacatcatatcacacaacctggctcatttctcttacattttttgtgtctttcagaggaagaaacttaaaccagtgatgtggagctggagtttgtccttccaccgagactacgagggcctttgatgcttagtggaatgtgtgtctaacttgctctctgacatttagcagatgaaataaaatatatatctgtttagtctttccctcat

SEQ ID NO: 991 - DNA, 140 bp, Homo sapiens
gagtgcagtagcatgatctcggctcactgcaacctccacctcccaggttcaagcgatcctcctgcctcagccccccagtagctgggattacaggcatgcaccaccatgcctggctaatttttgtatttttagtagagacg

SEQ ID NO: 992 - DNA, 1628 bp, Homo sapiens
aaatcgcctgaagatagtctttcaaatttggacatttaaaaaagaaacttttactgtagtcatgaagtagtatcaaagtttaccacaagtttgtattgagagaagaacaaacaatatatgctaatatgaaaaacagctctacttagaaagctactgcttgggttttcttattaggcatagttctccagactgagttggttttactcatctacatgatttttccttgccttatggaacagaaattcaggcccactcgaattcagttattttagggctctttaaaatccagtatttgtgatttaaatgatgcggagggactttcattacctgtgtctttgcttatttctctctggccctcagaacaccccaccctgacctttaggggaaattgacagaggcagagggtttcacctgcctcaattgtcaccagccctgttacattcttccttccaagccttagcctcacagggaccttctcattattgaacaattgccttcaaagcagtagaatagcccaattgttatggagattaaagataccgattgcaaaactcctgtaaataaaatcttcactgacaaacccagtttcttttcataggcttttcttctgtaatctctttctggcagaacatctcatgttttgatgttagagattcagttaccaaccacagtaaataaagcaaaataataatagaaaaatagtatagaactcaccctaaaaacaaacattggccaaccatgtttattttttgtctctctttgcactcctgagaattgataggggaagaatgtaccacctctaattcaggtgatttctgattagcaagctatggaaagtcttcaggttgagttttagccagttcacgctcccctaaatggcatggaatagactattttctgttttaagaaaaaatagaacaatggcactaaatgcttgactgaatgtttgactaaatgttgactgaatcatggataggaaagattgggcagaaaagacagccactgcctccagacacaggatgccacaatcctgggcaccatcattattccatacaaccttagggtcatttttagggtttagaactttctcaatagggtttcaagattttgaaaagtgtcttccaattctgatctccgtagatcctgttatgggaattaacctttttggaaggggattcttgttcttaaagatgaaattccctactttctttcctggagggaatcagtatgggcagagggaagaggagatggcgattctgacctgtgtgtctcatgtcacctaacacctatggggtggcatgaaacttgagctttaaaacacaccaggggccaggcacagtggctcatgctggtaatcccagcactttgggagaccgaggtgggtggatcacctgaggtcaggagttcgagaccagcctgccaacatggcaaaaccccgtctctactaaaaatacaaaaatcagctgggtgtggtggcgggcacctgtaatcccagctacttgggaggctgaggcaggagaatcgcttgaacctgggaggcagaggttgcagtgagccgagatcaggccattgtactctagcctgggtgacaagagtgaaactccatctgaaaaaaaaaaaaaaaaaaa

SEQ ID NO: 993 - DNA, 526 bp, Homo sapiens
gtagccacacagcagcctcaatgctttgctgcttaagtatttcttccacaaatatcctagttcatccctcttaagttctgcattccattaagtcctaggacacagacacaatttcacccagctctttgcaaccttatattttataaatatggcctttactccagtttccaataccttgttcctcatttctatctgcagcctcatcagaatggcctttaccagcattctaccagcactctggtcacatacacttaagtaatcacttaagtaatctctacgaagatttagacttcccctagttctaaggtcttctttcagagccctcaccagaattgcccctaatggcagaaccgttcttggcaatgcaggcttttttctagcctgctcctccaaacttgttcagccttcacggttatacagttccaaagccacttacacactttcaggtatttgttgtagtaacaaccccacatcttggtaccaactttctgtcttagttcttttgttaaatgcctgagactgggta

SEQ ID NO: 994 - DNA, 8125 bp, Homo sapiens; identical to SEQ ID NO: 950

SEQ ID NO: 995 - DNA, 5786 bp, Homo sapiens
cgcaggacctcatgagtaagctgtggcggcgtgggagcacctctggggctatggaggcccctgagccgggtaagcgcgaatagatcaagcaatttaggtcgtgttagaaaagaagtcccgttcttgctcctcggagagtccagggtacttcggccacaggtggcaaggagaaaggcggtgctgttgttatggtaacagcgagtactgcgggaagggtgggatccagtaggggcttaggttattcagggcttcccctgccaccctccggccaaacactgtcgacaggctttccttccacaggagaagccctggagttgagcctggcgggtgcccatggccatggagtgcacaagaaaaaacacaagaagcacaagaagaaacacaagaagaaacaccatcaggaagaagacgccgggcccacgcagccgtcccctgccaagcctcagctcaaactcaaaatcaagcttgggggacaagtcctggggaccaagaggtgaggccaagagggtcatagttttataaggggaactttaggagcagagatagtagttagaagccgactgggctttctagaagaccgaatggacactgtgacttcagggtccagatttaggcagcaagagtctaagagggtggggaaagttgggtgtagctacggagtaggaggaggagacgcttgctcattttaaagagtagtgttgcttctctgcagtgttcctaccttcactgtgatcccagaggggcctcgctcaccctctccccttatggttgtggataatgaagaggaacctatggaaggagtcccccttgagcagtaccgtgcctggctgggtgaggatctggaggtggggaaactgggtttcttattatacccgcctaaagaaagaaggttggttctgaaatgggttaggattttccatgtcccagtattaactcagccaaattagggtgccccatctgaacaattctgtttttctttctccaacttccttcccagatgaagacagtaatctctctccctctccacttcgggacctatcaggagggttagggggtcaggaggaagaggaggaacagaggtggctggatgccctggagaagggggagctggatgacaatggagacctcaagaaggagatcaatgagcggctgcttactgctcgacaggtatgttggttcattgtttattcactcaccaaatgtatacagtattgagaactctccacgacccacgcactttgcgtggcattggggatatcgatagtagagaaaagacaaagtttctgttctcctggagctagtattctagtgtgtgtgttggggggctgggaagtaaataagtaaataatttcaaaaagctatatggtttatgacaaaaagaaaagggtgatgaaatagaaagtggcgtaaacaaacagatagaaatgatggaagagagacattagggtagttagagaaggcttctttgaagagataacatttgcaataccagaagagcttttgagcagagaccagcaggcgcacagaccttgagactggaacatgtctagcaaaggagaagaaaaagtggacaagccactgaagggctgtacgcagagaagtgacatacttggtttacatttcaatagattactttggcatctttgtagagaatgaatcttcgtggagacaagagatagaagtatggagaacaactaggaagctgttgaagtaatcagctgagaggcagtggttgctttaaccaagacgaaagtggtggagatggagaaaatcagatgaattatggctatattttggaagtagatacttgtggggaggggaatggagagaaaatatatcaaggctaagcctgggattttggcttgagcagttatccacctgatactctctattgagataagattaaaaataacaacagacctctgggaaagctggtacagttttggtgcacaggtcaggcaggtaacattactgatgcttctccccttgagagataaggacctaaagctaaatgtcaggagatctgggaggaggcagtatttatgaagaggaacctatggaaggtgtcctggagagggtgctcattaattaatatcccgcctccgaaggcctgcactgctcaagaccctgccttccatgtcccttctttcccctcccccgatctggccgacctcgcctctccatcttcctccattttcagacagcaccccgtctctgtctctccctagcgagctctgctccagaaggcgcggagtcaaccttcccctatgctgccgctgcctgtagctgagggctgcccacctcccgccctcacagaggagatgctgctgaagcgcgaggagcgggcgcggaagcggcggctccaggcggcgcggcgggcagaagagcacaagaaccagactatcgagcgcctcaccaagactgcggcgaccagtgggcggggaggccgggggggcgcacggggcgagcggcggggagggcgggctgcggctccggcccccatggtgcgctactgcagcggagcacagggttccaccctttccttcccacctggcgtccccgcccccacggcagtgtctcagcggccatccccctcaggcccgccgccgcgctgctctgtccccggctgtccccatccgcgccgctacgcttgctcccgcacaggccaggcactctgtagtcttcagtgctaccgcatcaacctgcagatgcggctgggggggcccgagggtcctggatccccccttttggctacgtaaggcccttaacccggactctgcgccccgtcccatgcccgctcttgagtatcttccccaccctattaaattacatccggtgcttcggcttgtacagaactgggggagtgggatgttgtgggcagaccagtctccggtatacacgtattttgcccctgtcggagcttgcgtcgatgcctggggcttggaaaccaccgcaaaaaaccaggctgcaaaccagcggaccgacttttgggactccgcctcttccagccgggattacctggcgtgcttcggcctttggcgtcattccgaaaacataccgcaagccaatcagcggcaaccttgctcttcggggcggctgttcgttggttgatatgccagagcctgttctgttgtctgtattggctattgccgctgtcagtcagggccgtgggtcgaaccttcacctactctttgtctgtacaagctcttgttgtctgggtgagcggcggaggcgctgctgtggattggtcacagggagaaacctctgatctgttcctattggcccgtccgtcaagggacgatgatgattggtagggcagagcaatctgagtcctagttggtggagttctgcccggatggaagctccggccgcggagtgatggtggcctcagcgaagatgggccgggcagggaccatggcggtggcagcagaggtggcaggggcggggcggctggcggtagaggaggctgtggtcctcagggggctgtaggtggaggtatggctcgggccagcagcgggaacggcagcgaggaggcctggggggcacttcgggcgccgcaacagcaggtatcccaatagctccaaaacctatcacgacagccatttgtctctttcccctttccttgtcccttccttttgggggtgggggaggaactcacggagccaaaggtactgtgaagttcctaaacatgtctcttccactctttgtctaaactttgtaacgtagatgcagctgactttgcctgtagcctcatagaacccatcccatggctgcagtggaagcttgcggtggctctccagtgaccagaggcatagtgaggtcccagggaggctccctctgtcttgcaacagttatttgtgatctttttctatgtgcctattgtcacaacagagtccggcagcgtcttctcttgagggagcaatttggagaagagctggaacccagactcgcgccctggatgccatcctttatcatccacagcaatcccatctggttgggagcactgctctgggtctcacactgcccctcctctatcctagggagcctgaggcccaggggtggaaagatccagttgcgggtggggggtagtgaaccgcgcaggataatgaaagcaacttgctttggaaatgacctaccgctacccgttgtctgagactgagattatctcagactgtcttctggcttctgccaaaacactcccttaacagaaagcaccgaggggatgggggtaggggggttggggagagtgaggcttgagtgtgaaggaagtctcatatatgcagagctgaaatctccctctttgtatgtccacacttttgtcttgttctctagactgattcttgctattccaaatcctcttccacgttgacagcccttcagatatttcaacactcctctcagcatcctccacttcccccatctctccaagctgaacttggttcacagggtgggattgtgtatgtgcatgcaggaggtgggggtggacagtgccctgggctggaatcccccttagttctaagtgcctccttgcccgcagcttcgagagctgtgcccaggagtgaacaaccagccctacctctgtgagagtggtcactgctgcggggagactggctgctgcacctactactatgagctctggtgtaagtctccaagagggctatttccaggtccctgtgtccaccctcccttggacctcagaatttcggccttcagggccccttctctgcatgaaagatgcctgagttgctccctccttgcctcttgcagggttctggctgctctggactgtcctcatcctctttagctgctgttgcgccttccgccaccgacgagctaaactcaggctgcaacaacagcagcggcagcgtgaaatcaacttgttggcctatcatggggcatgccatggggctggtcctttccctaccggttcactgcttgaccttcgtgagtgacttgatgccctgggtcagctaccagtggccctccccaaaccagaaccccaaatcgtctcacattcccttttccacacatttcaaagtatttttccctaatataaaaactagcaccctatacctggttgtcttcaaccaatcatgccaattttctcccctgcaggcttcctcagcaccttcaagcccccagcctacgaggatgtggttcaccgcccaggcacaccaccccccccttatactgtggccccaggccgccccttgactgcttccagtgaacaaacctgctgttcctcctcatccagctgccctgcccactttgaaggaacaaatgtggaaggtgtttcctcccaccagagtgccccccctcatcaggagggtgagcccggggcaggggtgacccctgcctccacacccccctcctgccgctatcgccgtttaactggcgactccggtattgagctctgcccttgtcctgcctccggtgagggtgagccagtcaaggaggtgagggttagtgccaccctgccagatctggaggactactccccgtgtgcactacccccagagtctgtaccgcagatctttcccatggggctgtcttccagtgaaggggacatcccataagtagttttgagagggtggatgggttacttgcccaccagaaacagccctagtcccaactccttgcgttcctttggcccctccctgcctacctagaatctgcctgaaagggctggagaggggcagtattgggggactgtgctagctttacccccgcaggacatacacaggagcctttgatctcattaaagagatgtgaaccagctacttgtg

SEQ ID NO: 996 - DNA, 4332 bp, Homo sapiens
tagagttcaaaatgttttttccaatttatttagaaaaatagactctggattcacattcaccccagggctatgtgggatgacagcaaggagacacctgagatgaaatgaggaaggtttgaattactggtatccaaggggctgggggcaaaagccagaagcctttgtcccttcagagccagagtggcatgagtgtcttggctcccctcctctccctcccttcagtagtcttcagccatggccagtaagacaaggctggtccagccgtggaaagggcggcagcccatgcctcgcccatcgcggtcactgtactgctcccaaagaaagcctgtagcctggtactggcgccatacattgcctaccacgttggcacggagctcaccgtggagtttggcagcccgagcctggtgaggaccctccagatgcccatagtggtggagtgctcccaaagccaggtagttgacattgagccacacagcaccccgccagtaggggggatcatgctctgaattgcgctggccataaaaggagctggaggctgcaagggagcgtaaaccaaaggggctccagagatggcggctgtcggctagaatgtccagcaggggcccaaggcgggatgaggtggggtccagcagtcgcagcagcaagggaaaaagactgacatagccaagagcatctacatactgcagttgaggttggggccgacccaccacccgaacgagcccctgagggggcctgggcttcagctgtactgcttttgtgtggttcccaaagtctgcaaagactcctagctctggggcccagtgcagctcatccaggctctctgctgcctccagtgaggcagccagtgggcccagctcagcagctacctcagcctcacccagatgctctgccagccgcgtcagcacacgggcacccagtgccacccaacatcgcaggtccaggtgccgctcggttactgaagggtgtgaagcccgggggtagtcatccagcccagagggtagggtcttggggttcagtaaggttggtaaggcagggtcccgtccccgccagcggtaagatagtggcagtgggcctgcctggctctgatggagccaggaaaaccaggcatgcaggcggggcaaggcctttcggaggaaagccaagtcgtcagggtcaccaacctctagcatatgggctacaggcaaaagtagggttggggggttggcgtggactgctcgttgtactaggaattctggaggcacccgggctcgggcctcatcccccagtatctgctccctcccaatccagccatcagcatttagcagccccagccagtggccaagggcttcccgggtgagggagggatcccaccgctgaaccaccagctggtgaaagccttcatcccaaaggaagcctcgtgggaagaatgaccgggagggcactgctgtaaaaagaggtacgggtggaaagagggctgggtccaccttctgctcagacccttccaccccgatgtctggcaataccagcccttgtccgtagaagtagccaattccaccaaggaggccgctgagggcagcctgacccaaaacctgctcgccagagctcaggcccttctccttcagctggaaggtcttctcaaagcgctctctaaagccttcagcatggctctccagggcctgggtcagtagactgcctgccagtcttggcagggcttgatttcctcctgcctgggcactgcctgattcaaacacaaactctatggaaatgggaattttcagggtcacctgctgtatcaagaactgcccctgcccttgcccacttggacctctgtcctcccacttcagggatcctggcaagccgaggtagcgttcagggggggcccctgggggccgatgctgaaaccagctatttaggcgactctttaccatctctgtcagcaggggcagtcctgggttggaggtccagaagacattgtagcttgaaggggagaagataaataggaaatattattcaagagaaggcagtgggcattataaagagaaatacaaagtgttcaggagtcaggttgggaggtctcaggcaggggacatggagactggtgaaaatgggaataaccaccccttccatcccccaacattcttttcccccagttacctgccatacttgggggctgtatcccctggactggttggtggcaaaagtgtaaagcggaagtcaccaagttcactggtgtgcccactgataaacttcaactgccccttggccccaacctctggtagtaggacttccttgccatctgtcaccacatagaagaacagggagaccaaagggagggcagaagtacctgagtcctgagtgaccaacgaggacagaaaagaacagtgttagattggcattctctcttgaattccctcttgagaatcagccttagtgagggaaaggaacagtaggcaggggtaatgtaaacaacatacgtctggcagtaatgagggtcactgagggtaaccaggtacacccaagcgggatgagataaagagccttgcactgggtgccctgggagataacagtatacttttgtactatgtcctacactaagaactctacacagttgatttcatttaattctttttttttttttttttttttgaggcggagtctcgctctgtcgcccaggctggagtgcagtggcgcgatctcagctcactgcaagctccgcctcccaggttcacgccattctcctgcctcagcctcccgagtagctgcgacaataggcgcccgccaccacgcccagctaattttttgtatttttagtagagaccgggtttcaccgtgttagccaggatggtctccatctcctgacctcatgatccgcccgcctcagcctcccaaagtgctgggattacaggcgtgagccaccgcgcctggcttttttttttttcttgagatggagttttgctcttgttgcccaggctggagtgcaatggcacgatctcggctcagcgcaacctccacctccctggttcaagcaattctcctgcctcagcctcccaagtagcttggatcacaggcatgcgccaccacgcccggctaattttatattttcagtagagacggtgtttctccattttggtcaggctggtctggaactcctgacctcaggtgatccgccagcctcggcctcccaaagtactgggattacaggcgtgagccaccgcgcccagcctctttttcatttaattcttacagtcctgtgagttaagtgctattattatctacattgtacattttacaagcaaggaaatcaaggcttagagatggtaaatagaaatggttatacaggcagttgtttaaggcaggatttaagccaggcagccagagcccacttcatgctgcatttgctggcagcaagggaaggatggagggggtctgggctgagaaaagggtgtcctgaggccctgacctgaggctctacagtcactctccagctccagtcccctccgtgctgacccccaggcctcttgacgaactcagtggtgagccttaaggccccatcctggatgtgttggcgcccgaaggagaggccgtcgtggaactcccagccatagggacccacaccgtccccctgctcacacgtgtgcctgagcttaggagtccccggggtggtgccctgctgcgcccacatcagtcctgggggtagaatggccacgtaagtcaaagagcaggggacctgtccctccgggtctccgggtcatccctcttcataactctcctgatccattccttcccacccttgctctcgcttcaagctggggcgcccagattaggagtccgcctgcctgcccgccctggggcccggttaccggtgaggaggggcttcgggctgcgggtcttcatgccgaagtagacgtgagggcggtaggttccccagaagaggtccggggccacggcggggctggaggagtcggcaggcaacacaggaggcgcggagtgcagcgtgaccgcccgccgcgcacggtaccacgccagcacccagcgccccgacatacccagggccaaagacaggaccacgacggccagagccactcctccagccgtgctacgcggcccgccgccccggccgtcccgtcgcccggggcctccccgagccgccctctcggctgtccgcactccctctgccggcactgcgcggcgccgccgctcgccccgagccatcctggcactgaggtccgcgtcacaagagctcggagaggcggcagtggagcccgggtcctgcctcacctctccggctcccgcctctcgccctggcgaccaccgtccggttagcgacacctgccagccagcgcctgcgcctcc

SEQ ID NO: 997 - DNA, 143 bp, Homo sapiens
tgagacggagtcccgctctgtcgaccaggctggagtgcagtggcgcgatctcggctcactgcgacctccacctcccgggttcaagcgattctcctgcctcagcctcccgagtagctgggactacaggcgcgtgccatcacgcc

SEQ ID NO: 998 - DNA, 2841 bp, Homo sapiens
tctagttcatttccactcatatctatttctgctaatagattgacagcaacctttggtttaatgctgtgttctctagctacaccaacaagttatatattcctttccaatattaaccaagtatttattttatgttagcctatgactgagttttatctatgcttgcacatatatagaatgtaaaaatataattctccatgtttaatgtatccatataaaaatgaaaatacccattttctgcattcttaaagggttaagaaaagtaacatgtaataagcacatggaggactttagaccatttcttgtgttagaggagactttatacatttgtgaggttttctgtcttttggtccttttatgttcttagtccatttcattattgttttaatatttctaccaaggaatgaccaagaaaagagaaaggaagaaaaaaaatgtgttaatcattttcttttaatggtatgtcagcagaaggggttctgactgtaagctaatgtgcacttgtgcctgtcctctttgtcttaaactaaagttggtggtatgaatcgaaaaatgtgtattggtttaaaaagcagtttatgatatgaaacagtcttccagtttttatatcaactcctttgctttcaacagtcagttcaaagcaccatttattgatggtttactgtatgccagacactgtattttttctttacgtattaccctacttaatcctcaacacaattttatgaagtagttattgttagcctgaaactggcatttctccatccttttatggtgctgtctttgaaaagtctcagatgtgtaacatgtcctagaagtagataattatcaaaggaagactgcaactgcaactcacttccctctgagaaaaaatatccctgactagattacatatctagttccagaccagaacctggtggtattaaaagtgttttggttgactattgtataccataatgagtacctacattcccaaattgcctgcctggttgttgtacagacttaaaaatctagcctgccttgatttttacttttcagatacacatgtttaaagagatctttgctggtcacagtagctcacacctgtattcccagaactttgggaggccaaggtgggaggattgcttgagcccaggagtttgttcaagatcagcctgggtctctacttaaaaaaaaaagaaaaatttagctgggtatgttggcacgtgcctgtagtcccagctactcaagaggctgaggcaggaggatcacataagcacagaagtttgaggctgcagtgaactatgatggagccattgcactccagcctgggcagtagaggagacttgtctctctctgtatatttgtctctctctccctctctctctctgtctctcataatacatatatacatacatatatatatacacacacacacacacacatacagagagatatataaaatagatataaaaataaagatattttaaagattatttataaatatatgttttttaaaaatgtagtctattataagccaaatgtcattaggcatgtagtccatttctttctgtgttcaggcaggagttccagttctataaacattggtttatctgtttttctagcaggtgcacacatgggttctcagtgatgtgtagccggggcatagattgctctcagtctgttgcaccctgcaggggagatgtctgaggtcctccctcgcctggctgtgctggacgcacagtgcatagcagaactaactgcacagcagaaatgcctgttctgcgttcccattgatacaccaacagctaatgaagtctcttttacttttaagaaacccttatttggctttggcatatttacatggtagaggcctagaattttataaataaaattttgaagaatagaaatgtattttttcacgatttaaaaaccacctgtatggtttactctggagttgacctgttccactcatccttctccccagttcatttgtttcgtttcaattccactttcccttatagctatcttcaaagcagtgtctatgggacagcattgccaagagccctgactgggcctggcttggtaactcactcctgtaatcccacctgcccctagaagtgcagatatactagaaaatacagctgtctttgttccagtgaatatgtataaggggtgacatgccttggtggaaagcagctcagattgtgtggactcctcaatccctgctctaccaagagctctccagttccaaaactgtacactcagtggctatgttctgtgtgcctgctcccaatacagccattatgttgttcatccagatttgagaatttaagcttttcactcctctttgggtagtattatttaagtaagaacttctaggaaaatagtatgagtttggttatttttccctcggcagcaggaattttctgaatatttagcacattcagattgctccaagaacagcattgagcaatgctgtacatgtgctttctcctaaggctgtctcccctgtctactgggttctggaaagactcattgtccttcagggaagggagcatttttcctcactgccattgctgagccttttctcctgttgtatactatttagcccagcatgaagccatcgccgactgtaaggagtgatggatagaagtgtttacttggtttgtgaggccttgtctctaaagggtaacagtctgacaaggaaaacatttcaaagagccctgaccaggcctggcttggtaactcactcctgtaatcccagtactttgggaggccgaggctggagaatcatttgagcccaggggttcgagaccagcctgggcaacacggtgaaaccccactctatttaaaaaaaaaaaa

SEQ ID NO: 999 - DNA, 758 bp, Homo sapiens
aagttattctttattgtggctctaatttggcatatttttcagacacaggttgctcttgatacatcaaatttctgctgttaaaaacttcagttattttgagtttagttaattcaggagcgggaacctaggtaagtcatctgtagagcatctttgcaccttaagagaagtttctgattagcctcaattcagtttagtagaatattagtgtggatatctggtggcaaaacctattcttggtgcaatttggcttttcgtggcctcaggcatagagctgacttggtagtggaccctctgtccacacccacccggcccttgcgcctttctagcataaagtggtgtgtcagagccactgtctccacagaaagcaccacgtttgtttcatttgacttatttgaacccgtttctcctgcctttgcctttttaaataaaaatagcaaaaattgattcaagtgaatctattagaattttctaaaatggagcccatttgtcttttcagtcttgcaagtaaagtctttaaaacaattaagcctcccaatgatttaaccgtattttcttacccccccaccctgaataatatttacaaagaaataataacgtgaatttttaaaaaccccgtccttcagttgttataaatgatagttcattcttggtaagtatatctgtaacaaaatactggggaaggacatgaggtatggtgaacacttaaaattctgccagccagcttaaatacataatctaaatttaacccacgtaacacc

SEQ ID NO: 1000 - DNA, 625 bp, Homo sapiens
aagtcacatacaggtagaccttatgacatttccagttgaaactaggcttgctttcggtacacaggtgaagacttgaggaagccagtgccagagaggacgtgcctcacccctcagctggctgaatgcgcttcattggcttacgctttgctttctgtatgctttctgtccttctgggtggtgtcgcatatatttttaaaaccacattcagtgtgatgaacacttgttggtacacttctaaggttagtcatctttccttctctgagcagatccttgagaagggcattgacagtggatgctttaaatagtgttcagtttttaccagtaataatattttttggtggatgtcatgaaaacacatgacatcgtgttgtgcccatgataaaaagtcctgactttttattgaatgaggtgtgctggtcaaagagacagacgtggctgccttctctggtaacagccagaggaaaaagttagcaattctagatgggttctacagctttaaaaaacttgttgtatccttaggtcctcataatattaaatattttctaattttaacagattttaagagtcagatatatactttgacttgaatgatgtagtgttgcttaaggaagaaaaaattataaaa

SEQ ID NO: 1001 - DNA, 17127 bp, Homo sapiens
acacggaggcgcgcacgatggcggcggaggtgctgagccgccgctgcgtgctcatgcggctactggacttctcctacgagcagtaccagaaggccctgcggcagtcggcgggcgccgtggtcatcatcctgcccagggccatggccgccgtgccccaggacgtcgtccgggtgagcgtctgccctgccccgcccggctcaggtccagagctgcggcgggagttggaggcaactgtgtgaccctaggcgggtcacttcgcctctctgagccctttggaaagtaggatggactgttcccctgctccattgatctccaaggggtgattctgtcttcagaggacgctgggtgatgaccggaggtgttcagggagggccgctccgggcgtggagtggatggaggccagggatactgctcagcaccctgcagtgcccaggacggccccgccccagacagtgatctggccccagggtccacagggctgcgcaggagaacctgcctagagtgaacaagacctggtagaatccagcagacgccctgggtgaagatacttttgcagatgagaaggggtgggtgggttgggggaagccctggttttctgtgagtgcctcatggttcatgccgccctctgagggcctgcctgccctccagggacagtcactgggccccctgctaccccctccagggacagtcactgggccccctgctacccccaccagggacagtcactgggccccctgctaccttgccacccccaccaggccagcagccccctaagtgtgtgtctgctccacagcaattcatggagatcgagccggagatgctggccatggagaccgccgtccccgtgtactttgccgtggaggacgaggccctgctgtctatctacaagcagacccaggctgcctccgcctcccagggctccgcctctgctgctgaaggtgtgctctgggctgcagggacggggcccgtgggcgtgggtgtggggaggcgtccccatcccaagggctgcggtcaccctgggctgtttctgctctcagcgtgtggcatcccttcgccggggttaacagtgggggttcctgggccccgtgtggacctgctacatcaccacctccgggctgggacctgggactctgcatttttgcagccgcctgtcccccctcccagctgctggctctgtgcacacgaaagaccagaaccacggactcaggaggagcctttccgatcctcaggggctcggggtttatgaaacacacgggcatctgttcagttctctacctgccaaggacattctcagcatcacatctcgagtgggcggcgtgggtgcgtcggcggtgtccttacggagaaggggcacacgcctttcctccagccccgtgaacgggggccctggcagcgaactcagagcaggaacccggagctctgtggtgggacctgtggtggggaaagatgggagttgccgctgtggagagtgaggagaaagaggaactggagaagccagctgaggggcttgcccggggctgtcatcagctactgggggagcagggctgagaagggaggccagagcccagggccgcagagaacaggcaggtgtgtcctggcccagccccaacaaaaacagtttggtgctgtggtttcaagctatagtaaaggaggctgaggcgggtgggtcccctgaggtcaggagttcgagaccagcctggccaacctggcgaaagcctgtctttactaaaaaaatagaaaaagttagccgggcgcggtggcaggtgcctgtaattccagcaacttgggaggctgaggcaggagaatcacttgaacccggaaggcggaggttgtggtgagctgaggtcacaccattgcactccagcctgggcaacaagagcaaatgtccatctcaaaaaaaaaaagtttcatcctacacagccagatcagtggaattccagatgcagagttggctaacactggccaggggccacctgtttttgttgataaagttttattggcactgggccacattcatttatgcacagtccacggtggctttcccagcagcagaactgaattgccgtggctgcggcagagaccatccagcctgcaaagccgaaagtgttatctgatcctttgcagaaaacgttcccaacccctggtttagattaaaagtcttgacagtggccatttttgttgtggtaatagaagagtatagttctgcagatacctaagtatcctgttagagaagaaggaaagaggagtcgtcttctttttttttttttttttcttttatgagacagagtctcactctgttgcccaggctggagtgcagtggcacaatcttagctcactgcaacctgaaggaggaatcttctacttggtggagtattatgcagctggtaaaaatgatgttgagggccaggcaaggtggctcacgcctgttgtcccagcacttacggaggctgaggcaggaggatcgattgagggcctggagtccaagattagcctgggcaatatagcaagacccttgtctctacagaaaatttaaaaaagccaggtgtggtggtgcatgcctgtagtcccagctgctcaggaggctgaggtgggaagatcacttgaacccttgaacctgggaggcagaggttgcagtgagctgagatcttgccattgcactccagcccgggtgacagtacgatactccgacttgaaaaaaaaaaaaattacagagagttcccaggagcatgcttcccccagtgatcatatctttttgttttgttttgttttgtttttttgagacggagtctcgttctgtcacccagactggagtgcagtggcacaatctcggctcactgcaagctccacctcccgggttcgcgccattctcctgcctcagcctccagagtagctgggactacaggtgcccaccaccacgcccagctaattttttgtatttttagtagagacggggtttcaccgtgttagccaggagggtctcgatctcctgacgtcgtgattcgcccgcctcggcctcccaaagtgctggtattccaggtgtgagccaccgcgcccggccgatcatatcttacatacctatgatgattgtgttttcatttttattttattctttcttattatcttttattttatttcaaaagattgtatttttaggccaggcacagtggctcattgcctgtaatcttagcactttgggagggtgagacaggaggatcgcttgatcctgggaggtagaggctgcagtgagccatgtttgcgtcactgtactccagcctgggtgacagcatgagaccctgtctcaaattaaaaaaaaagttgtgtttttaaaatgctttaaagcacagaagtgcggactcaaagttgtgtgaactcacaggcattttcgggcaggtcctggccctaagtccctaagtgaacagctgttattgagggcccgggaggaaaggatcagaatggcatggaggagaaattccccagcagaacgttccagaaaggagatgtgaataatttcgagagaaggttgtcctagggggagcacgggcatcctgtggtatcgaaatctgctggtcacgtccccacacccggctggttggctctgcccgagcccccaacctggggtgtcagtgctggggatgccccctggctggggccctggctgggccaaggctgatgcgccctctccctctccctagtactgctgcgcacggccactgccaacggcttccagatggtcaccagcggggtacagagcaaggccgtgagtgactggctgattgccagcgtggaggtgagtgccgcctgccccggagccagccccacgtccccaggggttcctgccatccgcctggctccccggctcggccgtactagaggggagccgctgatgggaaactggagtcggatcgcccccctgcctggctgaaaacctcctgtggctccgctggcagctgcaggaacccaaactcctcacatggccggggagtcgctctgtggagtgcccaggcccctgccagcccccggcccatctccttccttccatcatggacccccacacaccaagccgctgcctcccaccccagggcctttgcaccggctgcccctcccaggaagccccctccaggctgcagtgtcgccagccccctctcatcacataacctcacccgtcagcccagacgctgcgtcctcacagacccttccgagcaccccgggatatcagcagagtcaagagagggtggggagctgccggtgcggaagtagcctctcggatcatcagggcagatccagagggtgaagcctgtgtcgctgctgctgcagcactggcaggggccttaaaacccgaggaagcacccaccgactcctctagcatttccctgcgggacggcgccggtgaggggtgcagatgagtccacacagatgaggggttgcctcactgtcgggggagccctgaacaagacgtgcttgctgttttggggacccaggccttgttggggggtgcccgagtggaaaagcagcggcttaggccggggtggggaaagtgtcctggaggccccggctccccatagacaggccttggcggaggagccctggggtttgtcgatggcggctgttctgtttgttcctgttggattgtactgtgggcccgggaggcgcgtcctattcccagcgccagttagtgtgcagtgagacccggtagcctggcctgcgtcactccacagtggcacaggcgctgggctccgcatcccatggggccatgtcgattccctttcccctggctgtgccctttctcctgtgagcagagccctcttggcagctgggctttgagttcagccgttgaaggatctccaagtggaaaagcatgttgcaaaaacagcaagtagactcccacagccagacggggagtccccaggccacagccggccctctacctgcttttgtaaataaagtttttgcttgtttgtttttgttttttgagacagagtctctctctgtcacccaggctggagtgcagtggcgcgatctctgctaactgcaacctccgcctcccaggttcaggcgattgtcttgcctcggcctcccgagtagctgggattactgtcatgtgccaccacgcccagctaatcttttgtaattcttttttttttttttttgagatggagtttcgctcctgttgcctaggctggagtgcaatggtgcgatctcagctcactgcaacctccgcctcctaggttcaagcgattctcctgcctcagcctcctaagtagctgggattacaggtgcccgccaccacggccagctaatttttgtatttttggtagagacggggtttcaccatgctggccaggctggtctggaactcctgacctcaggtgatctacccgccttggcctcccaaagtgctgggattacaggcgtgagccaccgtgccgggctgtgtaaataaagttttatggcacacagccatgctgatgcatgtgcaagccgtccatggcagtttcttagttgtaacagacaccatctggtccccaaggctgaaaatatcccctctggccctttatgaaagtctgctggcccccgggctagagcagaatccgactttggtggggtaagaggcagggaggggtgcacacagaccctgaaggaacccgaatgcctggctgaggggctcagccccgttcccacaaacagttatcctcctgaggggctcagccccgttcctataaaaacttaacctcctggccgggcgcggtggctcacacctgtaatcccagcactttgggaggccgaggtgggcggatcatgagatcaggagatcaagaccatcctggctaacatgatgaaaccccgtctctactaaaaagtacaaaaaattagccggatgtggtggcgggtgcctgtagtcccaactactctggaggccgaggcaggagaatggcgtgaacccgggaggtggagcttgcagtgagccgagatcgtaccactgcactccagcctgggcgacagagtgagattccgtctcaaaaaaaaaaaaaaaaacacaaacaaaaaaaaaaaacttattctcctgctctccccgatttttaaagatttcgacctgagggccagagcaggagtgggtccctgttcccggctctacctcctccctggaggagctccctggggctcccagagtcagaggctggcacctcctgtggtcctcagtgctgaggccgatgctggcacccagcggacgggccccacgtggcccagaggggaggggtctccaagccccacacacgggtcacctgccccaggaacagccaggccattcccctgctctctatccacaggggcggctgacggggctgggcggagaggaccttcccaccatcgtcatcgtggcccactacgacgcctttggagtggcccccgtacgtatgtgtgtccccattccccccaccccacagggcttggattctggctccagtccagtgccgaggcaaagcgcctgtaggggatggcggccagggtcagcggctctccctgtgacggcctttgcccgtcatcctggtccccgcgagggcctcagggtgggtgtcgtggggctgaaacaggcccggctcttgccccggggtcgcaggttccagggcacggcggtgtctgtgtcagaggctgagcccagggagtctgagtcagggttccccgggccagcgctgggtgccgtggctccacacgaggcctcctcgaggctgtggtttgtcccagcgagcggtcatggagcacgtagcagagtccgcgaagggaaaggcgcgtgcggtgagttggggaggccagtcctggcttccaggccctctccctgtgtgtcacgtggaacacgcctcattgtcagcagtgagctgggacgacagcccaaagcactgtcaccagcgagacttccagagacccagcgcccggttcctatgggagctggttctacagcccctgctgcctggcccatgccgggattccagactccggagggaagcagggcccgtgtgtaaaccatggtgtttgcaggaacagctttggacccagagcctgtcctgtcagcgagggtcgggggccctgctgcaggttcctggtctcaggcctgcggcacaagcttggttctgctcagcgtgggttgagcgggagtggggtgggggggcatgtaccacggtgtcaaccagcaccctgcctcctcctttttttttttttttttttttttttttaattgagacagtcttgctctgtcccccaggctggagtgcagtggcacaatctcggctcactgcaacctctgcctcctgggtttaagcgattctcctgcctcagtctcccgagtagctgggaccacaggcacccgccaccacacctggctaattttttttatttttagtagagacggggtttcaccacgttagccaggatggtctcgatctcctgacctcatgatttgccctcctcagcctcccaaagtgctcggattacaggcctgagccaccgcacccagtcctgcctcctttgaacacaaatcagctgaaccaggcagagtgcggagggtctgggcagatctgctgcctggctgagtgcccgaccccttggagggccaggcccccagccttgagaatgcctggtcccgctgggcccacacaaactcaagctgctcagagcaatgcctcttgaactcctgacctcaggcaatccacccgcctcggcctcctaacctgctgggattacaggcatgagccaccgcgcccactgcctttctctgtcctcattgtcccctatgaagctttttttgttttaaatttattttatttatgtatttttttttttttttttgagacggagtctcgctctgtcaccaggctggagtgtagtggcgagatctgggctcactgcaaccttcgcctcccgggttcaagcgattttcctgcctcaacctccggagtagctgggactacaggcgcgtgccaccacacctggctcattttttgtatttttagtagagatagggtttcaccatgttggccaggatggtcttgaactccagaccttgtaatctgcccatcttggcctcccaaagtgctgggattacaggcgtgagccaccgagcccaggcaaatttattttttgagataatgatagaacataaagttcaccattttagagcgtacgagtgggttttagtacatccaaagttgtacggtctccacctctaattccagaacattccatcaccccaaaaagcagcccctccccatcagcagtcactcctggtcccctccccagccccagaaccccagcatgtgcgcatccgtcccagtgcctgtggactggcctgttggacgggtcctatgaacagatcctacactgtggacaaagtcttttggatctggcttctctcactgaggagggtgtttattgtccccctgaattcagtgccaccgaggtcccctttatatgctgtggccttgggacggtcccaagccattgcaatgtccaagaaacagtgtggccttattgagaatgctgctttagatcacaaaggtgcatccaagggcgggaagggcatgtggtcgggctgtgcaggtctctccacagccggggctcgagggtggaagggtgggtcccacagaggggaccccgcacagagaccagggctggacagatgctgccctctgtgagcgaatctggcctggccctgggctccaaattctgcatgtagcttctcccgggcgcgggccgagccgaggtggatgaggagagtcctgggcttggcggggccccgcagaccccaggccatcagtcggggattgaatacaggaggggagcgaccacagctgcccactggacgtggcagaggggctgggggacagcacagagatgaccgtggctgctgtgggcagaggtcatggggctacgggagtagggtgggggtgacggagagatgactgtggctgctgtgggcggaggtcatggggtgcgggagccgggcgggggtgactgtggccttgcctctcccgtccctgtagtggctgtcgctgggcgcggactccaacgggagcggcgtctctgtgctgctggagctggcacgcctcttctcccggctctacacctacaagcgcacgcacgccgcgtgagtgccggggtgggcagggggatgggggtgcgggggccacactgccggacagcgctgcccaccaggcacctctgcagatgtttctctggagcctcctggccccaaagtgggcctgagcccaggaattggggcgccttatttatcgagggctaagctgagccctcgcaggctctgtctcttggagtcccacagggcccagctgctgctcaccccaggaacctgctgggaatgctgtcagctgcaagtgttagagacgcccggttaagggccctggaactaggggatcccctcagccctgtgtggtcggggccggatttttcgctgggggtgggggccgtcctgggcactgcagggcgctgagcagcatccctgccccactcactccatgccaggaacacgccatagtcatgatagccacaggtgccctccgacatcacccactgtccgctgggggcagaagcacccctggttgagacccccctgggttagggaattccacgggcccccgagagactatgtcccgtgatcatctgccccgctgaggtcccaggaggctgcacacattgaaatccacaccctgagtaggaagggagagaggaggtgaatcccaggagctggggtccccctggtttatcccgtctaccccgttgggagtttatcctggtgtctggtgtgagcagggggcagacttgatttttccccagataatgaatgcaggcttcgtccccgtggccctgtggatgtcttctgtgcatgactctctcctgggtgccacccactccatcccaggagcacccccagacgtagcaaccacagatgtctccagacatgactgtgtctcctgtgcggggtggggtagaatcacctccgggtgagaccccggcccagtcacctgctcccgagatggtactgctgcagtcattgtgtcagcagctcagagaggccagggccactgtggctgagacgtttctcagccttctcacagtcacaaggcgccgggagtcatgtcctggttcaggcaggaacttggactcgaactcctggcctcaagcgatcctcctgcctcagcctcctaaagcactaggattacaggtgtgagccaccatgtccagccaaaacttgtttttttttttttaagctgcagaacctcttcccccagccccccactgatgccttttgagaagctcatgctgtcaaaaacgtgtgaacggggctggtttctgccaggcctgggggcttcttggcagctggggagaggttgggtttctggggcagagggaaactgggttggagagagtccggggcagatgtgggaagatgggggtagggggcgtgctgagcagtttccttctctgactctggtgacccttctaatagccaaggctgtgttccattagaatttttggcctgcctgggtggcttatgcctataatcccagcactttggaagcctgcggcaggtggatcacctgtcaggagttcgagacctgcctaacgtgttgaaaccctgtctctactaaaaatacaaaattagccaggtgtggtgctgcatgcctgtaatcccagctacttgggaggctcaggcaggataattgcttgaacccgggaggcagaggttgcagtgagccgagactgcaccattgcactccagcctgggcagaaagagcgaaactccgtcccaaaagaaaaaaaaaaaagaattcttcttctttaagtgaatagactttatttttttgatctcctcgtgtctgttgcctggtcggtcaccccggttcctcctgggctcagagaagcctctagagctggggtctaacgtggggtggccctgctgcctggagacactgagtgatttgcagttgtcattgggggaagctcccggtatggggtgggtgaggccagggatgccactcagcaccctgaagtgcccaggacagcctcacctcagagaaccatccagccccagtgtccacagggccgaggggtcatgccccgccctaaggggctggtcaggatttcctgctttggggagaccttcatacccttcctgggggacctgtgacctggcctggtccctcctccaccccaggcgcttgcccgtcaaagctaacactgggtcttccctcccagctacaacctcctgttctttgcgtctggaggaggcaagtttaactaccagggaaccaagcgctggctggaagacaacctggaccacacaggtgagcggccccgggtgggggtgggggtgccgcggtggtggtgccgtggggaggcacggaggcccaggggttgccatgggggcagccaggaggcacagagggagggccgggggccacttcctggtccccacccaccccgccagctctcggtgtcctgcagactccagcctgcttcaggacaatgtggccttcgtgctgtgcctggacaccgtgggccggggcagcagcctgcacctgcacgtgtccaagccgcctcgggagggcaccctgcagcacgccttcctgcgggagctggagacggtgggtgcccctttcatggatgggtccggagctctgcggagcacacacatcggggccgggttggggcatcctgtcccagggtgtccttgctgtccgcccctcaggctctgagggccacactgtgtcggggtcgggctggggtgttctgtcctggggtgtccttgctgtccaaccccggggctctgaggggcacactgcgtcagggccgggctggggtgtcctgtcccagagtgtccccttgtccctccttacccactgctcattgcccgccggggctccagcaggccttagggggaccccgggggcaggtggatttctcctcattttgcaccctcgggggttctgggaggcccctggagcatttggggaatgggctggggtggccgccatccccgcctgccctctgctaatggcgcctccggctgcaggtggccgcgcaccagttccctgaggtacggttctccatggtgcacaagcggatcaacctggcggaggacgtgctggcctgggagcacgagcgcttcgccatccgccgactgcccgccttcacgctgtcccacctggagagccaccgtgacggccagcgcagcagcatcatggacgtgcggtgagcgcggcagcacctgcccggcccctcctagggctttcctgggggctgagccactggtcgcaactgcagaggccatgagagcctggagggagcggcccccacacacaggctgcgaggaaggggccggtgcgtggccaaggccggctgcacggtcaggccgttcgcaagctcttccttactggggctagggagggcgaggccagcagcctgaggtcgtggccccatataggacccccagaccccgtcacctgttgagttaggagcaagcagctcctgcctctgggcctcttcagggccctgccacagcccgaaagtcctgcctggccccggccaccgtcttggggagcctggcccgccaccacaccccggcccttcctcgccccgcctccctctgggcactgtgtctctggcttcttatgtcctctgaccctgtgtcctgcccgtctctctgccatcatgtgagcccctgggcaggcttttgtggagcctggaactgtctggccaccccaggcacactcctggccagtcctggcaccagcaggtgggcgccgtctcctcccccagcgcccgcagtcccggcatagatccttcccgttcatccactctgctctgcggtcactgggccctcaggagtggtttgagctcagccatcggaggcctgcagaagccagtggcgggagggaggggcacatccctgggtaatcgcagtcctggaaaggatggaggtggcggtcgcccaccagccaggaaagattgccaggaaatgagggtgggtgcacggctgtcccagctgtgctgagctctctcaagaccaccaggggtcagcccaggagggccacctgggatttgcagagggtcccagaatggattcttccaccaggacggaatagtccagtttaaattctggaagagcagaaaaccgagtcagaaggaaccaaggcctcagggcgtgagccttacctgcgcacagggacgggtcagggcaaggggcctggaggtgtggggcccccagtgaatctgcatctacatgttagccaagtagttaaagctaagcttaatttttttttttttttaaagacagagtctcacggtctcctaggctggagtgctgggattacaagtgtgagagctaccttgcctggcccaaagtccacattttaaaacattgtttttgaatcgtgaaggtcccgggtggattctaagaccctgacccgtaacacgaggatcattgcagaggccctgactcgagtcatctacaacctgacagagaaggtgagccctgagccctctgtgccgccagacccagccccagccctgcccccggccccggccccacccctggccccagccccactgcaggggcctggactcagggccatcccctcctctctccgcaggggacacccccagacatgccggtgttcacagagcagatggtaagggggccaggccagtgggtgggtgggtgggcggggccaggccatgactaccaccaccgtccctacagcagatccagcaggagcagctggactcggtgatggactggctcaccaaccagccgcgggccgcgcagctggtggacaaggacagcaccttcctcagcacgctggagcaccacctgagccgctacctgaaggacgtgaagcagcaccacgtcaaggctgacaagcggtgaggctggggctccgcgctggccccgttcagcctggggccgagggggacctccccctactgcatctcccaccccctcacccctgggggatgccaggtggagcaaatacaaagagagggtgggatgagggccggacacggcggctgtgcctgcaatcccagtactttgggaatccgaggcaggtggatcacttgaggtcaggagttcaagaccagactggccaacatagtgaaacctcatccctactaaaaatacaaaaattaggcggatgtggcagtgggcacctgtaatcccagctacttaggaggccgggacggaagaatcgcttgaacccaggagttggagaccaacctgggcaacatagcaagaccccatctctacaaactttttaaagtttttatttatttgtctttgagatggagtcttcctctgtcacccaggctggagtgcagtggcgtgatcttgtctcactacagcctccatctcccggcttcaagtgattctcggacctcggtctcctgagtagctgggattacaggcacccgccaccatgcccggctaattttttttaatttttagtagagatggggtttcaccgtgttggccaggttggtcttgaactcttgacttcaagtgatccgcctgcctcaacctcccaaagtgctgggattgcaggtgtgagccatcgtgcccagtctccatctctacaaacccttttttaagaattagctgggcgcagtggtgccccctgagaaagtgctctctccccagggacccagagtttgtcttctacgaccagctgaagcaagtgatgaatgcgtacaggtgagtggtggccagcgggacctggagcccttcaccccctacgggttacagccgaggggactgcggcccacgggggtctaggggttcatgttactgccgcgcaccatcctcgacctcagggaccctgctttctccacagagtcaagccggccgtctttgacctgctcctggctgttggcattgctgcctacctcggcatggcctacgtggctgtccaggtgagcagtgcccaggctcaggtggggcaggggccgcccgccgggaggagctgggctgggcgtctccaagtgcatcctggcccctggctcagcctagagtcacatgacctggggctctggccccgcccacatcctcactccctcctgctgtgtccccagcacttcagcctcctctacaagaccgtccagaggctgctcgtgaaggccaagacacagtgacacagccacccccacagccggagcccccgccgctccacagtccctggggccgagcacgagtgagtggacactgccccgccgcgggcggccctgcagggacaggggccctctccctccccggcggtggttggaacactgaattacagagcttttttctgttgctctccgagactggggggggattgtttcttcttttccttgtctttgaacttccttggaggagagcttgggagacgtcccggggccaggctacggacttgcggacgagccccccagtcctgggagccggccgccctcggtctggtgtaagcacacatgcacgattaaagaggagacgccgggaccccctgcccgatcgcgcgcggcctccgcccaccgcctcctgccgcaaggggcctggactgcaggcctgacctgctccctgctccgtgtctgtcctaggacgtcccctcccgctccccgatggtggcgtggacatggttatttatctctgctccttcttgcctggaggagggcagtgccagccctggggttctgggattccagccctcctggagccttttgttccccatgtggtctcagtgacccgtccccctgacagtgggctcggggagctgcatcacccagccttccccttctccgactgcagggtctgatgtcatcattgacagcctttgcttcgtgggggcctggcagggcccctgcctccccgacccccgacccactgcaaatccccgttcccctgcactcctcttctcccagcccatccctccggcccctgtgcctctgcggccccagcccagctcccagggccgtcacctgcttggccctggcccagctccctgccctgagtcctgagccagtgcctggtgtttcctgggctcggtactgggcccccaggccatccaggctttgccacggccagttggtcctccctggggaactgggtgcgggtggagtactgggaggcaggaggtggcccggggaggccttgtggctcctcccctcgctcctcgccctgggcctcagcttcctcatcaatagaaaggatgtgttcggggtgggggcgtcaggtgagaacgtttgctgggaaggagaggacttggggcatggcctctggggccacccttcctggaactcagagaggaaggtccgggccctcgggaagccttggacagaaccctccaccccgcagaccaggcgtcgtgtgtgtgtgggagagaaggaggcccgtgttgagctcagggagaccccggtgtgtccgttctttagcaatataacctacccagtgcgtgccgagcaggcttggtggggaagggacttgagctgggcaagtcctggcctggcacccgcagccgtctcccttccgtggcccagggaggtgtttgctgtccgaaggacctgggccggcccatgggagcctggggttctgtccagataggaccagggggtctcactttggccaccagttcttcggccagcacctctgccctccagaacctgcagcctggaggggtgaggggacaaccacccctctttcctccaggttggcaggggaccctcttctcccgtctgccctgcgggttgcccgcctcctccagagacttgcccaagggcccatcaccactggcctctgggcacttgtgctgagactctgggacccaggcagctgccaccttgtcaccatgagagaatttggggagtgcttgcatgctagccagcaggctcctgtctgggtgccacggggccagcattttggagggagcttccttccttccttcctggacaggtcgtcatgatggatgcactgactgaccgtctggggctcaggctggtgtgggatgcagccggccgatgagaaaataaagccatattgaatgatcgccaccagtgtttggtctgggggctgtgagaattggattgtgacaa

SEQ ID NO: 1002 - DNA, 2454 bp, Homo sapiens
agtggtgccccctgagaaagtgctctctccccagggacccagagtttgtcttctacgaccagctgaagcaagtgatgaatgcgtacaggtgagtggtggccagcgggacctggagcccttcaccccctacgggttacagccgaggggactgcggcccacgggggtctaggggttcatgttactgccgcgcaccatcctcgacctcagggaccctgctttctccacagagtcaagccggccgtctttgacctgctcctggctgttggcattgctgcctacctcggcatggcctacgtggctgtccaggtgagcagtgcccaggctcaggtggggcaggggccgcccgccgggaggagctgggctgggcgtctccaagtgcatcctggcccctggctcagcctagagtcacatgacctggggctctggccccgcccacatcctcactccctcctgctgtgtccccagcacttcagcctcctctacaagaccgtccagaggctgctcgtgaaggccaagacacagtgacacagccacccccacagccggagcccccgccgctccacagtccctggggccgagcacgagtgagtggacactgccccgccgcgggcggccctgcagggacaggggccctctccctccccggcggtggttggaacactgaattacagagcttttttctgttgctctccgagactggggggggattgtttcttcttttccttgtctttgaacttccttggaggagagcttgggagacgtcccggggccaggctacggacttgcggacgagccccccagtcctgggagccggccgccctcggtctggtgtaagcacacatgcacgattaaagaggagacgccgggaccccctgcccgatcgcgcgcggcctccgcccaccgcctcctgccgcaaggggcctggactgcaggcctgacctgctccctgctccgtgtctgtcctaggacgtcccctcccgctccccgatggtggcgtggacatggttatttatctctgctccttcttgcctggaggagggcagtgccagccctggggttctgggattccagccctcctggagccttttgttccccatgtggtctcagtgacccgtccccctgacagtgggctcggggagctgcatcacccagccttccccttctccgactgcagggtctgatgtcatcattgacagcctttgcttcgtgggggcctggcagggcccctgcctccccgacccccgacccactgcaaatccccgttcccctgcactcctcttctcccagcccatccctccggcccctgtgcctctgcggccccagcccagctcccagggccgtcacctgcttggccctggcccagctccctgccctgagtcctgagccagtgcctggtgtttcctgggctcggtactgggcccccaggccatccaggctttgccacggccagttggtcctccctggggaactgggtgcgggtggagtactgggaggcaggaggtggcccggggaggccttgtggctcctcccctcgctcctcgccctgggcctcagcttcctcatcaatagaaaggatgtgttcggggtgggggcgtcaggtgagaacgtttgctgggaaggagaggacttggggcatggcctctggggccacccttcctggaactcagagaggaaggtccgggccctcgggaagccttggacagaaccctccaccccgcagaccaggcgtcgtgtgtgtgtgggagagaaggaggcccgtgttgagctcagggagaccccggtgtgtccgttctttagcaatataacctacccagtgcgtgccgagcaggcttggtggggaagggacttgagctgggcaagtcctggcctggcacccgcagccgtctcccttccgtggcccagggaggtgtttgctgtccgaaggacctgggccggcccatgggagcctggggttctgtccagataggaccagggggtctcactttggccaccagttcttcggccagcacctctgccctccagaacctgcagcctggaggggtgaggggacaaccacccctctttcctccaggttggcaggggaccctcttctcccgtctgccctgcgggttgcccgcctcctccagagacttgcccaagggcccatcaccactggcctctgggcacttgtgctgagactctgggacccaggcagctgccaccttgtcaccatgagagaatttggggagtgcttgcatgctagccagcaggctcctgtctgggtgccacggggccagcattttggagggagcttccttccttccttcctggacaggtcgtcatgatggatgcactgactgaccgtctggggctcaggctggtgtgggatgcagccggccgatgagaaaataaagccatattgaatgatcgccaccagtgtttggtctgggggctgtgagaattggattgtgacaa

SEQ ID NO: 1003 - DNA, 3658 bp, Homo sapiens
tggattctaagaccctgacccgtaacacgaggatcattgcagaggccctgactcgagtcatctacaacctgacagagaaggtgagccctgagccctctgtgccgccagacccagccccagccctgcccccggccccggccccacccctggccccagccccactgcagggcctggactcagggccatcccctcctctctccgcagggacacccccagacatgccggtgttcacagagcagatggtaagggggccaggccagtgggtgggtgggtgggcggggccaggccgtgactaccaccaccgtccctacagcagatccagcaggagcagctggactcggtgatggactggctcaccaaccagccgcgggccggcagctggtggacaaggacagcaccttcctcagcacgctggagcaccacctgagccgctacctgaaggacgtgaagcagcaccacgtcaaggctgacaagcggtgaggctggggctccgcgctgccccgttcagcctggggccgagggggactccccctactgcatctcccaccccctcacccctgggggatgccaggtggagcaaatacaaagagagggtgggatgagggccggacacgtgcgctgtgcctgcaatcccagtactttgggaatccgaggcaggtggatcacttgaggtcaggagttcaagaccagactggccaacatagtgaaacctcatccctactaaaaatacaaaaattaggcggatgtggcagtgggcacctgtaatcccagctacttaggaggccgggacggaagaatcgcttgaacccaggagttggagaccaacctgggcaacatagcaagaccccatctctacaaactttttaaagtttttatttatttgtctttgagatggagtcttcctctgtcacccaggctggagtgcagtggcgtgatcttgtctcactacagcctccatctcccggcttcaagtgattctcggacctcggtctcctgagtagctgggattacaggcacccgccaccatgcccggctaattttttttaatttttagtagagatggggtttcaccgtgttggccaggttggtcttgaactcttgacttcaagtgatccgcctgcctcaacctcccaaagtgctgggattgcaggtgtgagccatcgtgcccagtctccatctctacaaacccttttttaagaattagctgggcgcagtggtgccccctgagaaagtgctctctccccagggacccagagtttgtcttctacgaccagctgaagcaagtgatgaatgcgtacaggtgagtggtggccagcgggacctggagcccttcaccccctacgggttacagccgaggggactgcggcccacgggggtctaggggttcacgttactgccccgcaccatcctcgacctcagggaccctgctttctccacagagtcaagccggccgtctttgacctgctcctggctgttggcattgctgcctacctcggcatggcctacgtggctgtccaggtgagcagtgcccaggctcaggtggggcaggggccgcccgccgggaggagctgggctgggcgtctccaagtgcatcctggcccctgctcagcctagagtcacatgacctggggctctggccccgcccacatcctcactccctcctgctgtgtccccagcacttcagcctcctctacaagaccgtccagaggctgctcgtgaaggccaagacacagtgacacagccacccccacagccggagcccccgccgctccacagtccctggggccgagcacgagtgagtggacactgccccgcgggcggcggcctgcagggacaggggccctctccctccccggcggtggttggaacactgaattacagagcttttttctgttgctctccgagactggggggggattgtttcttcttttccttgtctttgaacttccttggaggagagcttgggagacgtcccggggccaggctacggacttgcggacgagccccccagtcctgggagccggccgccctcggtctggtgtaagcacacatgcacgattaaagaggagacgccgggaccccctgcccgatcgcgcgcggcctccgcccaccgcctcctgccgcaaggggcctggactgcaggcctgacctgctccctgctccgtgtctgtcctaggacgtcccctcccgctccccgatggtggcgtggacatggttatttatctctgctccttcttgcctggaggagggcagtgccagccctggggttctgggattccagccctcctggagccttttgttccccatgtggtctcagtgacccgtccccctgacagtgggctcggggagctgcatcacccagccttccccttctccgactgcagggtctgatgtcatcgttgacagcctttgcttcgtgggggcctgaggcccctgcctccccgacccccgacccactgcaaacccccgttcccccgcactcctcttctcccagcccatccctccggcccctgtgcctctgcggccccagcccagctcccagggccgtcacctgcttggccctggcccagctccctgccctgagtcctgagccagtgcctggtgtttcctgggctcggtactgggcccccaggccatccaggctttgccacggccagttggtcctccctggggaactgggtgcgggtggagtactgggaggcaggaggtggcccggggaggcttgtggctcctcccctcgctcctcgccctgggcctcagcttcctcatcaatagaaaggatgtgttcggggtgggggcgtcaggtgagaacgtttgctgggaaggagaggacttggggcatggcctctggggcacccttcctggaactcggagaggaaggtccgggccctcgggaagccttggacagaaccctccaccccgcagaccaggcgccgtgtgtgtgtgggagagaaggaggcccgtgttgagctcagggagaccccggtgtgtccgttctttagcaatataacctacccagtgcgtgccgagcaggcttggtggggaagggacttgagctgggcaagtcctggcctggcacccgcagccgtctcccttccgtggcccagggaggtgtttgctgtccgaaggacctgggccggcccatgggagcctggggttctgtccagataggaccagggggtctcactttggccaccagttcttcggccagcacctctgccctccagaacctgcagcctggaggggtgaggggacaaccacccctctttcctccaggttggcaggggaccctcttctcccgtctgccctgcgggttgcccgcctcctccagagacttcgcaagggcccatcaccactggcctctgggcacttgtgctgagactctgggacccaggcagctgccaccttgtcaccatgagagaatttggggagtgcttgcatgctagccagcaggctcctgtctgggtgccacggggccagcattttggagggagcttccttccttccttcctggacaggtcgtcaggatggatgcactgactgaccgtctggggctcaggctggtgtgggatgcagccggccgatgagaaaataaagccatattgaatgatcgccaccagtgtttggtctgggggctgtgagaattggattgtgacaa

SEQ ID NO: 1004 - DNA, 607 bp, Homo sapiens
gagcagagggagtgagggtggggaagggacagggcaggttgtgcagggcctggtgggccacggggaggacttgggctttgaccccagggcagctgggagccatggagggctgtgggtagaagagcgacaggccctgactcaggtgctcccaggcgccctctgacggctaccgcagggaggacagacgggagtggcgagggtttagcctaggaccgggtagaggtgactgggctggcacaagtggaggcagagaaggatgggctcatcctgttccccctccaccgctgtgttcctggagtgcagaggaggggctacagagatgcttccagaaccagtgtgtggcctggaccaagacctggactgctgggggcttcctgagcaagacccacatccctgcagtcaaagctgcctcttctcagaccagggaacttcagaaacaggcagggaacccacccccccaccagggtcccctaggaatcggcaacagagcctcaaacccagcacggggtctctgcctccccaaaacatgtggcaggagaagcttgttcaggagggagaggagggaggggatggacccagagcgaaaggcaggcagggcagggttgca

SEQ ID NO: 1005 - DNA, 606 bp, Homo sapiens
gagcagagggagtgagggtggggaagggacagggcaggttgtgcagggcctggtgggcacggggaggacttgggctttgaccccagggcagctgggagccatggagggctgtgggtagaagagcgacaggccctgactcaggtgctcccaggcgccctctgacggctactgcagggaggacagacgggagtggcgagggtttagcctaggaccgggtagaggtgactgggctggcacaagtggaggcagagaaggatgggctcatcctgttccccctccaccgctgtgttcctggagtgcagaggaggggctacagagatgcttccagaaccagtgtgtggcctggaccaagacctggactgctgggggcttcctgagcaagacccacatccctgcagtcaaagctgcctcttctcagaccagggaacttcagaaacaggcagggaacccacccccccaccagggtcccctaggaatcggcaacagagcctcaaacccagcacagggtctctgcctccccaaaacatgtggcaggagaagcttgttcaggagggagaggagggaggggatggacccagagcgaaaggcaggcagggcagggttgca

SEQ ID NO: 1006 - DNA, 2894 bp, Homo sapiens
aagaactgcaccaaactcaaatccctggatatcggcaaatgccctttggtatccgacacgggcctggagtgcctggccctgaactgcttcaacctcaagcggctcagcctcaagtcctgcgagagcatcaccggccagggcttgcagatcgtggccgccaactgctttgacctccagacgctgaatgtccaggactgcgaggtctccgtggaggccctgcgctttgtcaaacgccactgcaagcgctgcgtcatcgagcacaccaacccggctttcttctgaagggacagagttcatccggcgttgtattcacacaaacctgaacaaagcaaatttttttaaaagcagcgtatgtaagcaccgacacccactcaaaacagctctttcttccgggaaggttattaggaatctggcctttatttttcctcatttctcatgggcaacagaggccaaagaaacgaagcaagacaaacagccaaacaggcatttaggtcaggtcatttgtaggcagtttctcttctcacaaaagatgtacttaagcaggctgatcgctgttccttgagcaaggcgcttactctcctccgctcaggcccccaaggcctgccctttccctcgcacacaggccccacccccacagttccacgccccccccccaaggccacaccctccctccctagagcagcagcgaggatccatcatcagaatcacagtgctctccagacctcctctctaaactgcttcattgacctaagtcactctcttcaatcccacacccatggacattcttgtcaactcaataccatagcactttgcataggcaaaatacttttcaggcctttttaaaaaattcattacagcaaacagctggggaaggacatgcagtcctcccccagctctgtcaatgactatgaccttggccaaagcacttcactgctctgggctgcagcttccagcactgaatcagaggccacacagcccaaagattagcttcatgtccattatagcattgagggagcagagatacccatacacagaagcaccttggcatagagcacccaggcatcgacctcttccaggagaactgattctgtggatggatgtgatttcaggagattgtgcagtgccagcatcagtgcataaagggtcctgtatgtcctttggctgcaaatcacccacttccctgtgtttcagtgggagaatttcctctcccacctcctcacatcctcttttgccaggctggatgctgtcgtctctgtacacaaatactttctgcattcccccctccacaccatcctagcgaggcaccagcacacctaatcacagcaaagcccagatccccccatcagttgcttttactcagtgttttcaaataggagtaaaggcccttgcaatttttaattaacaagcaaggcccaagggaacacatgtcctcaaaagtttttctgatccctcgccttgcacacctggcatgcatcaggcacatctgtcctacagctggcagagacagatgcctcggttctttgtcattcagattgcatttgacctcttctcatctatttatttctttatacatccagacttcatcacatgaagcctattggggttaagtttgtaagtgtttaattgtgcaaattgccaccctgtgtacctcctccatgtctgtctgcgtgttttccaccaaagaatgcaaagcagacttccaggtgtttaaattctgttcactcaacaatgccagatgaatggaagagggaacacactgagatgacttagactctggtccaccaaccagacccttggaaaggaatactaaaatcattacaaggtatggattttaaatggatgaaacttcaaattatcttatttggatagaagtctatattctagcctcatttgcatgaagtcagatagccagaagaaattccattgctggttttcacgaaattcacttgtcttttgctaataaacacatggccctttcccagattattctctagccaagccccacctttgttacgttgaaatccctcatttattttcttctcaaaatgcccattatccaaatgcagaacctctgcatctccaagccagttatgctgaatttgtcaaacttagacacccttgacaactgcactcctactgtaggctcctgtgcatactgtcgtcttctgtgggggatggagaggttagtgtgatgaggtggtgtctgcccaggaggtttctttcaaacatcatggcctcccatccaatcaacatcatcaaattacatgtgtaatcaaggctctgtgccatgggggaaatgaatcatttagctaggccaggatctagtgaaagccacagagtttaaaaccatgaaagaagttgaaggcagcattcctcagctctgtgacttgtgaccctatttgaagtttcaggatttgggtgtcacaaaggattgtccctaatccttggccctggggtcttccgagtgagctggtttaatactctgagaatgagcagggagatccagagaatgaatccctgaccgcatcacctaaactgtcttccaaacatgagacaaagctgactgttcacactgattgcccagcacataccgtcttgccagtttcttcttttctcccagtctcctgttcatccattctgttctcccttggggtgggaatctatgatggaggttactggggaaacagctcagcagatttttggagaccaaaccaaaggtctcactaggaaatttatctgttttaaaacattgcttccttcctggctctgctaaattgaatgctcattgtttgttgttgttgttttttaattctaatgttcaaatcactgcgtgctgtatgaatctagaaagccttaatttactaccaagaaataaagcaatatgttcgtaatca

SEQ ID NO: 1007 - DNA, 3207 bp, Homo sapiens
aaaaaaactacactcagcccagcacattgatcaagtatctatctctgagcagttggccttgccagggagagcagagatgtggcaggctccttcagctggagacagggagcttctcagagaagtgagcagagactccacagacaccctaaaaaggcttctactcaagaagtaaagccactactcctgcctttttgcttagtggacaggaaggcacaggagtttgtctgggacatcatagaaattcttaggtttaacttaattctggtcattgtcttctttatttcctgtttttcttccctttgtcagtcttcgcatccaagatttcttccctccctcttgtgggccagcctgtcctgttccagagctagcctgttcctgggtagccttccttagcctccattcagcctcaggtcttttgccttcttccgtgtttatttagagagcagaatctaataacgggttccactgtagccactatccatggacttctgggtcctcttcaggtttgagtgcttgaaaatgttcattctctgggcttgtggcctgtctcctccactctcctcctcaccctctcgctccttcctgtgtgagggccgctctgcagtaatgttctcaggcaagccttcctaggcacctcagaaactactttgccagagccagtaagaatatataatattggagcagttgccaggatagaaattaaatatagattccagtttaggatagagtttttaccgagagctcttcagacagtatacctgtgtcttctctggcaattgctttcattttagtcctatataaaagctttccttttctgtttttttttaaaactatgcttttgcttgcctaaatcttttgatcttatatttctctcatctcagagcctgtcctgagttgtaaggtatttcatactgccttacttaaaagttttttaaactactagagtcatttgatacacacagaagttacctaataatccaaagatgtccatcaagggaggaagggtgggtcatcagactttgcctttgatgttgtagactaggctcctgagttaagcagcagagggacagcagtgccatgtgccttcactgtgtcccaggaaatctgggttggttccagtgggaaataccagtatttcttggttctggaaagtagcaaaagagtaggagatggggaaatagggatggggagagcaagccccgcatgtccatggcgagtcaggtggggagcacgggtggaagggccggctgttgacagacagactaagctgtgtggtgctcttgccgccccttcctgggtacagagcttgagaaaaatgcagccgaccactccctgtgtttgtacagagcaaagcccaaaagccaacctcagatctcctgatttggcagctgaagaaatcagcagagtcctgattgcctgattcagtcccaaaaatgaatgtcaggccccgccccctccccaccaacattgcctctcctacattctccttctgcccctaaatcagacaggaggccagagaggagtattgctcaatgcgtgctatgtgcaactcctcaggccttgtgccacctccatgctgagcccctgaagcagggtgtcctgggtgcctgtgtgtcagctccctcctctctacctacctctgaccttcttgtgggtgagggtggccatgcttatggccatcttaaaactggagaggcagagaactacttatgagtctgtagaccacgtgttgtcttccatggcctgtttctcctgctgtctgggtgagtgagcctgcaacgcaatgcccatgagagtaaatgcctcctgacctaccctgctcagcactgttctagtgtcttggccttgaaagaaaagcctgacttcctgctgacacatgtggtaggggcatggcagctatgaggcacctcctacgtctgttttctggctgtggtgacttgggatttttaaccttatatatctttttcctttactcaaaacaaaacaatttttagcacactgaaaaaaaaaaaaagccaaatgttttgtgcctttctaaggcagcactgtatcccaggctgcattttaggacttaatatggaaataccagagtctgagctcctctaccttgagtttcattagtccttagtgtctaggagacaggaaagaatgctctctgtgactggagaggtgacatgcaggtgcagtgtgtctggagtccctttcccctgctgtgagacttcagtggaggagagaagcattgtaccctgggatcatttggttggttccaatcacaagcttagttatcaggttgcatgccttgtctcctgcaaaagacagaatgtttcacaattcccaggtaaactctggaccattccaagtgtcctagccttctgatgacattaattacctagttgtgtggaggagtataggatggactcctgagaaggggaggttggtggctttgtcttttctttttgctggatcctgaactggtctagacctcctgcccccaccccccagcccccatcagatgtggctggcctttcatttgaaggcttcagacttaaagcattaagcagctagtgccctctgcagggcctggtttccccagggaagggcagcaaggaacatgggaccagaagcctgtcctcagtaatgtgactatagtgagctttagcaaaagtttttctatataatgacatcttacttatcttttaccctttcctcagttttcccctgcctttaactaataaagaattgggagacagaaattttaaagtcctccttattcaagattttgaaattcttagcctgggagtgctggagagaacctggtgctttctccagaatgaagagtcccaatttgtatatcagtgttaagaagaaaacaaaacaaacacataggtgagattttcgtggactattttaaaaatgtgtcattaatataaaaaatttatattagcagtatttaatcattctcacctgtaaagaataagaaaaacagaaggtaaatattcttacagagaatagcagagctttaagattcattttcattttaagtccattttattttgccagtgtattaatgtttagaagtctgttttactaatgttatttattaattttttttcatttccatacacagttagttaactaaagagctttttcaagcacccatgtctgtaaaaaaatatttttaaataaagtttcttttgttgtagcaga

SEQ ID NO: 1008 - DNA, 3206 bp, Homo sapiens
aaaaaaactacactcagcccagcacattgatcaagtatctatctctgagcagttggccttgccagggagagcagagatgtggcaggctccttcagctggagacagggagcttctcagagaagtgagcagagactccacagacaccctaaaaaggcttctactcaagaagtaaagccactactcctgcctttttgcttagtggacaggaaggcacaggagtttgtctgggacatcatagaaattcttaggtttaacttaattctggtcattgtcttctttatttcctgtttttcttccctttgtcagtcttcgcatccaagatttcttccctccctcttgtgggccagcctgtcctgttccagagctagcctgttcctgggtagccttccttagcctccattcagcctcaggtcttttgccttcttccgtgtttatttagagagcagaatctaataacgggttccactgtagccactatccatggacttctgggtcctcttcaggtttgagtgcttgaaaatgttcattctctgggcttgtggcctgtctcctccactctcctcctcaccctctcgctccttcctgtgtgagggccgctctgcagtaatgttctcaggcaagccttcctaggcacctcagaaactactttgccagagccagtaagaatatataatattggagcagttgccaggatagaaattaaatatagattccagtttaggatagagtttttaccgagagctcttcagacagtatacctgtgtcttctctggcaattgctttcattttagtcctatataaaagctttccttttctgtttttttttaaaactatgcttttgcttgcctaaatcttttgatcttatatttctctcatctcagagcctgtcctgagttgtaaggtatttcatactgccttacttaaaagttttttaaactactagagtcatttgatacacacagaagttacctaataatccaaagatgtccatcaagggaggaagggtgggtcatcagactttgcctttgatgttgtagactaggctcctgagttaagcagcagagggacagcagtgccatgtgccttcactgtgtcccaggaaatctgggttggttccagtgggaaataccagtatttcttggttctggaaagtagcaaaagagtaggagatggggaaatagggatggggagagcaagccccgcatgtccatggcgagtcaggtggggagcacgggtggaagggccggctgttgacagacagactaagctgtgtggtgctcttgccgccccttcctgggtacagagcttgagaaaaatgcagccgaccactccctgtgtttgtacagagcaaagcccaaaagccaacctcagatctcctgatttggcagctgaagaaatcagcagagtcctgattgcctgattcagtcccaaaaatgaatgtcaggccccgccccctccccaccaacattgcctctcctacattctccttctgcccctaaatcagacaggaggccagagaggagtattgctcaatgcgtgctatgtgcaactcctcaggccttgtgccacctccatgctgagccctgaagcagggtgtcctgggtgcctgtgtgtcagctccctcctctctacctacctctgaccttcttgtgggtgagggtggccatgcttatggccatcttaaaactggagaggcagagaactacttatgagtctgtagaccacgtgttgtcttccatggcctgtttctcctgctgtctgggtgagtgagcctgcaacgcaatgcccatgagagtaaatgcctcctgacctaccctgctcagcactgttctagtgtcttggccttgaaagaaaagcctgacttcctgctgacacatgtggtaggggcatggcagctatgaggcacctcctacgtctgttttctggctgtggtgacttgggatttttaaccttatatatctttttcctttactcaaaacaaaacaatttttagcacactgaaaaaaaaaaaaagccaaatgttttgtgcctttctaaggcagcactgtatcccaggctgcattttaggacttaatatggaaataccagagtctgagctcctctaccttgagtttcattagtccttagtgtctaggagacaggaaagaatgctctctgtgactggagaggtgacatgcaggtgcagtgtgtctggagtccctttcccctgctgtgagacttcagtggaggagagaagcattgtaccctgggatcatttggttggttccaatcacaagcttagttatcaggttgcatgccttgtctcctgcaaaagacagaatgtttcacaattcccaggtaaactctggaccattccaagtgtcctagccttctgatgacattaattacctagttgtgtggaggagtataggatggactcctgagaaggggaggttggtggctttgtcttttctttttgctggatcctgaactggtctagacctcctgcccccaccccccagcccccatcagatgtggctggcctttcatttgaaggcttcagacttaaagcattaagcagctagtgccctctgcagggcctggtttccccagggaagggcagcaaggaacatgggaccagaagcctgtcctcagtaatgtgactatagtgagctttagcaaaagtttttctatataatgacatcttacttatcttttaccctttcctcagttttcccctgcctttaactaataaagaattgggagacagaaattttaaagtcctccttattcaagattttgaaattcttagcctgggagtgctggagagaacctggtgctttctccagaatgaagagtcccaatttgtatatcagtgttaagaagaaaacaaaacaaacacataggtgagattttcgtggactattttaaaaatgtgtcattaatataaaaaatttatattagcagtatttaatcattctcacctgtaaagaataagaaaaacagaaggtaaatattcttacagagaatagcagagctttaagattcattttcattttaagtccattttattttgccagtgtattaatgtttagaagtctgttttactaatgttatttattaattttttttcatttccatacacagttagttaactaaagagctttttcaagcacccatgtctgtaaaaaaatatttttaaataaagtttcttttgttgtagcaga

SEQ ID NO: 1009 - DNA, 3207 bp, Homo sapiens
aaaaaaactacactcagcccagcacattgatcaagtatctatctctgagcagttggccttgccagggagagcagagatgtggcaggctccttcagctggagacagggagcttctcagagaagtgagcagagactccacagacaccctaaaaaggcttctactcaagaagtaaagccactactcctgcctttttgcttagtggacaggaaggcacaggagtttgtctgggacatcatagaaattcttaggtttaacttaattctggtcattgtcttctttatttcctgtttttcttccctttgtcagtcttcgcatccaagatttcttccctccctcttgtgggccagcctgtcctgttccagagctagcctgttcctgggtagccttccttagcctccattcagcctcaggtcttttgccttcttccgtgtttatttagagagcagaatctaataacgggttccactgtagccactatccatggacttctgggtcctcttcaggtttgagtgcttgaaaatgttcattctctgggcttgtggcctgtctcctccactctcctcctcaccctctcgctccttcctgtgtgagggccgctctgcagtaatgttctcaggcaagccttcctaggcacctcagaaactactttgccagagccagtaagaatatataatattggagcagttgccaggatagaaattaaatatagattccagtttaggatagagtttttaccgagagctcttcagacagtatacctgtgtcttctctggcaattgctttcattttagtcctatataaaagctttccttttctgtttttttttaaaactatgcttttgcttgcctaaatcttttgatcttatatttctctcatctcagagcctgtcctgagttgtaaggtatttcatactgccttacttaaaagttttttaaactactagagtcatttgatacacacagaagttacctaataatccaaagatgtccatcaagggaggaagggtgggtcatcagactttgcctttgatgttgtagactaggctcctgagttaagcagcagagggacagcagtgccatgtgccttcactgtgtcccaggaaatctgggttggttccagtgggaaataccagtatttcttggttctggaaagtagcaaaagagtaggagatggggaaatagggatggggagagcaagccccgcatgtccatggcgagtcaggtggggagcacgggtggaagggccggctgttgacagacagactaagctgtgtggtgctcttgccgccccttcctgggtacagagcttgagaaaaatgcagccgaccactccctgtgtttgtacagagcaaagcccaaaagccaacctcagatctcctgatttggcagctgaagaaatcagcagagtcctgattgcctgattcagtcccaaaaatgaatgtcaggccccgccccctccccaccaacattgcctctcctacattctccttctgcccctaaatcagacaggaggccagagaggagtattgctcaatgcgtgctatgtgcaactcctcaggccttgtgccacctccatgctgagccctgaagcagggtgtcctgggtgcctgtgtgtcagctccctcctctctacctacctctgaccttcttgtgggtgagggtggccctcgcttatggccatcttaaaactggagaggcagagaactacttatgagtctgtagaacacgtgttgtcttccatggcctgtttctcctgctgtctgggtgagtgagcctgcaacgcaatgcccatgagagtaaatgcctcctgacctaccctggtcagcactgttctagtgtcttggccttgaaagaaaagcctgacttcctgctgacacatgtggtaggggcatggcagctatgaggcacctcctacgtctgttttctggctgtggtgacttgggatttttaaccttatatatctttttcctttactcaaaacaaaacaatttttagcacactgaaaaaaaaaaaaagccaaatgttttgtgcctttctaaggcagcactgtatcccaggctgcattttaggacttaatatggaaataccagagtctgagctcctctaccttgagtttcattagtccttagtgtctaggagacaggaaagaatgctctctgtgactggagaggtgacatgcaggtgcagtgtgtctggagtccctttcccctgctgtgagacttcagtggaggagagaagcattgtaccctgggatcatttggttggttccaatcacaagcttagttatcaggttgcatgccttgtctcctgcaaaagacagaatgtttcacaattcccaggtaaactctggaccattccaagtgtcctagccttctgatgacattaattacctagttgtgtggaggagtataggatggactcctgagaaggggaggttggtggctttgtcttttctttttgctggatcctgaactggtctagacctcctgcccccaccccccagcccccatcagatgtggctggcctttcatttgaaggcttcagacttaaagcattaagcagctagtgccctctgcagggcctggtttccccagggaagggcagcaaggaacatgggaccagaagcctgtcctcagtaatgtgactatagtgagctttagcaaaagtttttctatataatgacatcttacttatcttttaccctttcctcagttttcccctgcctttaactaataaagaattgggagacagaaattttaaagtcctccttattcaagattttgaaattcttagcctgggagtgctggagagaacctggtgctttctccagaatgaagagtcccaatttgtatatcagtgttaagaagaaaacaaaacaaacacataggtgagattttcgtggactattttaaaaatgtgtcattaatataaaaaatttatattagcagtatttaatcattctcacctgtaaagaataagaaaaacagaaggtaaatattcttacagagaatagcagagctttaagattcattttcattttaagtccattttattttgccagtgtattaatgtttagaagtctgttttactaatgttatttattaattttttttcatttccatacacagttagttaactaaagagctttttcaagcacccatgtctgtaaaaaaatatttttaaataaagtttcttttgttgtagcaga

SEQ ID NO: 1010 - DNA, 863 bp, Homo sapiens
aactccatcagtcccctaattgtcagcctttacctccctcccagagcaaggagtttagggattctaaagcttagtgtccacacatcattctaccagaccttagagctttagaagctcaatctaaaatactgtaactcagcataaactattactatcactcctttgaactcagtctccatgagcagtgttttgttggaaatacatagaacggcttaatgcctagagggtggtggatagtgaaggacggtcaaggttatatttttgactgcttagggattctttggatacaagaaacagaaatgttcaagcggaataaaggagggagtggagttgtggtaaggatgcagggtatttcgcagaacccaggacgggaagtgcctttggttcttgggtggagctggaactgcagagctttgcacctagtcctttctcccgcttcacagtctgcttatggtatatgtggcccccaaataggcactctagtcctcaagtctacaccaccttccaactctggggatcaccatgaacaaattctcaatttcccatacttaattttttttttttttgagatggagtctcgctgtgtcgcccaggctggagtgcagtggtgcagtctcaactcaccacaacctccgcctcccaggttcaagcagttctctgcctcaacctcccgagtagctgggattacaggcgcctgccaccatgcccagctaatgttcatatttttagtagagacagggtttcaccgtcttggctaggctggtcttgaactcctgaccctcatgatccacccacctcggcctcccaaagtgctaagattacaggcgtgagccaccgcgcccggcccatacttcgtattctta

SEQ ID NO: 1011 - DNA, 4428 bp, Homo sapiens
caatgtatgatttctgggacaattaagctttatttttcatatatatatatattttcatatatatatatacatacatatataaaggaaacaatttgcaaatttacacacctgacaaaaccatatatacacacatatgtatgcatacacacagacagacacacacacccgaagctctagccaggcccgttttccatccctaagtaccattctctcatttgggcccttctagggttggggccctgagcttggtttgtagaagtttggtgctaatataaccatagctttaatccccatgaaggacagtgtagacctcatctttgtctgctccccgctgcctttcagttttacgtgatccatcaagagggctatgggagccaagtgaacacggcggattgaggctaattcacctgaactcaaaaacagtgcccagcttcctcaccgcaggcacgcatcttttctttttttttcctcgagacggagtctcgctgtgttgcccaggctggagtgcagtggcacggtctcggctcactgcaagctccacctcctggattcataccattctcctgcttcagccttccgagtagctagggactataggtgccaaccactacgcctagctaattatatattgtatattagtagagacagggtttcaccgtgttagccaggatggtctcgtcctgactattgtgatccgcccgcctcggcctcccaaagtgctgggataacaggcgtagagccaccacacctggccccggcacgtatctttcaaggaatagacaccagttcctggcttctgaccaaagaaaaaatgtcacaggagactttgaagaggcagacaggagggtggtggcagcaacactgcagctgcttctggatgctgctggggtgctctccggagcgggtgtgaacagcgcacttcaacatgagcaggcgcctggctccggtgtgtcctcacttcagtggtgcacctggatggtggaagccagcctttggggcaggaaaccagctcagagaggctacccagctcagctgctggcaggagccaggtatttacagccataatgtgtgtaagaaaaaacacgttcttacaagaaactctcctacccgctcgggagactggggctccttgcttgggatgagcttcactcaacgtggagatggtggtggactggtccctgaaaagcgggccttgcaggccaaagtgaggtcctcaggtcctaacccagtggccctctgaaagggggtgtgcaggcgaggggagcaggaggcttctctctagtccctttggaggctttggctgagagaagagtgagcagggagctgggaatggtccaggcagggaagggagctgaagtgattcggggctaatgcctcagatcgatgtatttctctccctaaaagtgggtagaggagaagaggggaacacggagacggtgctgagttgaaggtgtgagcaccgagaggaaggagagatggaagcagaagccgatgaatttggtgggcagcgttggggaggaagctaggatgggcatggcaggccagggaaggagggcggcccccgtctgactgcactggtgaaatggccacacccagagccacgggcattggtcaggaaaaggtgatgggacagggtctttctcagtcttcctccaagctccctcagccacttgcttggccctgccatctgtgagtagtgttaagaaggcaagatggggcctgctccctatctctgacaaagagggatgaaggatagagagaaccgttagtccctactgcccccggtccctgaggatgtggcaggctctggccacaggaaccgcctcctacctggtctcccggagccctcttgtcaccgctgctgccctgcaggaggcccatctcttctgggagcttatctgacttaacttcaactacaagttcgctcttacgagacgggggcagcgtgctgggaggagggagggaggtgagaggttggtatctcagggccacaggaagagaagggcccgctgtgaaggatgtggaatggatgagggctccttgctccagggccagcccagggcagggaagcaggtcatgagaccatgtggctgatggaagctgggcagtgggtagtggagcaggcagcaccctgacccagggccccactcctgctgtcaaggggcaggcgggcgctgggcaggcagcaggctgggtggcaaaacgggcgggggcggaggggccggtgttgggcttacatctcctgcttccctgagcgcctgcacggcagcttgcccttcttatagaggaaatagaggacagcgcccagcaccgccaggaccaggatgcacacaatcacagccacgatgaccacgcccccggctctccggctccggcagctttctctctgcgccacaaagacactcctcgtcactccctgccccaggccacttcgtcaccatcgttgccccagccagtccagggccgacaagatggggctgctactcacctttctggacagggctctctggggagggacagggcagaaaggatgccctggcacagccctgttctcttgccaggcctggcttacctgtggaggtgctgttggctctggtatgaggactggcagtggaagtgctgaggccagtggttgtgttggagtctggtgtgagggtggttaaattgactaggaggcagagggaggggtgttaggagaagcgcaagttactgcccgtgcctgggcctgcccctgccatcccctgcagggatgcagccctcacccagctccaggaagaggatgctggtgtttttgcccaggtcgttggaggccgtgcattcaacacctgtctccaacagctccggggtcacgaggacattcagggtgctcaggactcgctgtggatcttggtcttgttcacttgcctgcgaggaaaggaaggaggcagctcaggggatggggaggatctctggtcctggccacaaagcgcaggcagggattaggagagtgtggcagatgagacacccgctcaccgtgccgttgacgttccaggagatggtgggccgggggtgccctgacgcttcacaagacagattcaacaccatattctctttcacccacaccttcctctccttgaatgccatccaaggggggccttggggaggtagggagaggtgaggtggcaagcccagctagcctgcctccccctccgcaccagagctccccagggcagcaggtggctttttgtcaaagagcttaaaaaccaccccacttggggtgacctggtctctaccccagagggagggcctcaccaaaaatggccacgttgaccagctgtgtgcggttcaggccgggtatgctgggcacagacgccacgcagcgatagccgcctcctgcctcccgtttcaggtcatgcaactgaagcacaggccccctttccagcacctggcctgtctgggatgagagatgggtcagagggtctgggaaagagcacattcttgtcacccgccagccccacccaccccatcagccccttgccccagacccgcctgggtacctcttctctcagcctctggaactcgagctcctggctactctctgctcacaggtcaggtgaggctgctgccttcctgtctctcaggggctgcgggactcactcggacgtcagacacatctgggggtacagcaatcatgtcacccagggcagggtggggccagttccctattgccccagcctggtccccctgtcctgggtccccagcccctcacagttcaccagtagttcctgtggttcactcagcagcgatatcatggtgtccaagtccaggccctgacattcatagcgcccactgtgttccttccgggcaggctccagcaccaggaccccgttgtcgttggttgtctcttcctctgcctccctggtgctggggttctagggaggattggggaggtgagcagagtgcacctcccgccactccacctgggtctctgcttgcatccccacctgcacccagcacaaagcccccacacctgcttgctgatgctgaagtgtggtggagggttgccatcagccaaacacctgatttccacgcggtccccttccttcagcattcccacgggctccacttccagccacactttttctgtcgggtctgcataggcaaagggggtagctcttggcccatgagtcaacctgggctgataagggggagccagcaggagtttccagcagccccagccccagtaagcagagagtcaggttagtactcacagaaaacagggacggtgacttccctggactccttcatgtggttcccactgggcagccggtagttgagctcacagtaaaactgggcatctttgtcttctttaaccagctgtgccttcagaatactctgcaaggtgtacaaaccactcgactccacagtctgggacgactgaatgtggac

SEQ ID NO: 1012 - DNA, 863 bp, Homo sapiens; identical to SEQ ID NO: 1010

SEQ ID NO: 1013 - DNA, 3439 bp, Homo sapiens
caatgtatgatttctgggacaattaagctttatttttcatatatatatatattttcatatatatatatacatacatatataaaggaaacaatttgcaaatttacacacctgacaaaaccatatatacacacatatgtatgcatacacacagacagacacacacacccgaagctctagccaggcccgttttccatccctaagtaccattctctcatttgggcccttctagggttggggccctgagcttggtttgtagaagtttggtgctaatataaccatagctttaatccccatgaaggacagtgtagacctcatctttgtctgctccccgctgcctttcagttttacgtgatccatcaagagggctatgggagccaagtgaacacggcggattgaggctaattcacctgaactcaaaaacagtgcccagcttcctcaccgcaggcacgcatcttttctttttttttcctcgagacggagtctcgctgtgttgcccaggctggagtgcagtggcacggtctcggctcactgcaagctccacctcctggattcataccattctcctgcttcagccttccgagtagctgggactataggtgccaaccactacgcctagctaatttttttttgtatttttagtagagacagggtttcaccgtgttagccaggatggtctcgtcctgactttgtgatccgcccgcctcggcctcccaaagtgctgggattacaggcgtgagccaccacacctggccccggcacgtatcttttaaggaatgacaccagttcctggcttctgaccaaagaaaaaatgtcacaggagactttgaagaggcagacaggagggtggtggcagcaacactgcagctgcttctggatgctgctggggtgctctccggagcgggtgtgaacagcgcacttcaacatgagcaggcgcctggctccggtgtgtcctcacttcagtggtgcacctggatggtggaagccagcctttggggcaggaaaccagctcagagaggctacccagctcagctgctggcaggagccaggtatttacagccataatgtgtgtaaagaaaaaacacgttctacaagaaactctcctacccgctcgggagactggggctccttgcttgggatgagcttcactcaacgtggagatggtggtggactggtacctgaaaagcgggccttgcagggccaagtgaggtcctcaggtcctaacccagtggccctctgaaagggggtgtgcaggcgaggggagcaggaggcttctctctagtccctttggaggctttggctgagagaagagtgagcagggagctgggaatggtccaggcaggaagggagctgaagtgattcggggctaatgcctcagatcgatgtatttctctccctaaaagtgggtagaggagaagaggggaacacggagacggtgctgagttgaaggtgtgagcaccgagaggaaggagagatggaagcagaagccgatgaatttggtgggcagcgttggggaggaagctaggatgggcatggcaggccagggaaggagggcggcccccgtctgactgcactggtgaaatggccacacccagagccacgggcattggtcaggaaaaggtgatgggacagggtctttctcagtcttcctccaagctccctcagccacttgcttggccctgccatctgtgagtagtgttaagaaggcaagatggggcctgctccctatctctgacaaagagggatgaaggatagagagaaccgttagtccctactgcccccggtccctgaggatgtggcaggctctggccacaggaaccgcctcctacctggtctcccggagccctcttgtcaccgctgctgccctgcaggaggcccatctcttctgggagcttatctgacttaacttcaactacaagttcgctcttacgagacgggggcagcgtgctgggaggagggagggaggtgagaggttggtatctcagggccacaggaagagaagggcccgctgtgaaggatgtggaatggatgagggctccttgctccagggccagcccagggcagggaagcaggtcatgagaccatgtggctgatggaagctgggcagtgggtagtggagcaggcagcaccctgacccagggccccactcctgctgtcaaggggcaggcgggcgctgggcaggcagcaggctgggtggcaaaacgggcgggggcggaggggccggtgttgggcttacatctcctgcttccctgagcgcctgcacggcagcttgcccttcttatagaggaaatagaggacagcgcccagcaccgccaggaccaggatgcacacaatcacagccacgatgaccacgccccggctctccggctccggcagctttctctctgcgccacaaagacactcctcgtcactccctgccccaggccacttcgtcaccatcgttgccccagccagtccagggccgacaagatggggctgctactcacctttctggacagggctctctggggagggacagggcagaaaggatgccctggcacagccctgttctcttgccaggcctggcttacctgtggaggtgctgttggctctggtatgaggactggcagtggaagtgctgaggccagtggttgtgttggagtctggtgtgagggtggttaaattgactaggaggcagagggaggggtgttaggagaagcgcaagttactgcccgtgcctgggcctgcccctgccatcccctgcagggatgcagccctcacccagctccaggaagaggatgctggtgtttttgcccaggtcgttggaggccgtgcattcaacacctgtctccaacagctccggggtcacgaggacattcagggtgctcaggactcgctgtggatcttggtcttgttcacttgcctgcgaggaaaggaaggaggcagctcaggggatggggaggatctctggtcctggccacaaagcgcaggcagggattaggagagtgtggcagatgagacacccgctcaccgtgccgttgacgttccaggagatggtgggccgggggtgccctgacgcttcacaagacagattcaacaccatattctctttcacccacaccttcctctccttgaatgccatccaaggggggccttggggaggtagggagaggtgaggtggcaagcccagctagcctgcctccccctccgcaccagagctccccagggcagcaggtggctttttgtcaaagagcttaaaaaccaccccacttggggtgacctggtctctacccagagggagggcctcaccaaaaatggccacgttgaccagctgtgtgcggttcaggccgggtatgctgggcacagacgccacgcagcgatagccgcctcctgcctcccgtttcaggtcatgcaactgaagcacaggccccctttccagcacctggcctgtctgggatgagag

SEQ ID NO: 1014 - DNA, 2668 bp, Homo sapiens
caatgtatgatttctgggacaattaagctttatttttcatatatatatatattttcatatatatatatacatacatatataaaggaaacaatttgcaaatttacacacctgacaaaaccatatatacacacatatgtatgcatacacacagacagacacacacacccgaagctctagccaggcccgttttccatccctaagtaccattctctcatttgggcccttctagggttggggccctgagcttggtttgtagaagtttggtgctaatataaccatagctttaatccccatgaaggacagtgtagacctcatctttgtctgctccccgctgcctttcagttttacgtgatccatcaagagggctatgggagccaagtgaacacggcggattgaggctaattcacctgaactcaaaaacagtgcccagcttcctcaccgcaggcacgcatcttttctttttttttcctcgagacggagtctcgctgtgttgcccaggctggagtgcagtggcacggtctcggctcactgcaagctccacctcctggattcataccattctcctgcttcagccttccgagtagctgggactataggtgccaaccactacgcctagctaatttttttttgtatttttagtagagacagggtttcaccgtgttagccaggatggtctcgtcctgactttgtgatccgcccgcctcggcctcccaaagtgctgggattacaggcgtgagccaccacacctggccccggcacgtatcttttaaggaatgacaccagttcctggcttctgaccaaagaaaaaatgtcacaggagactttgaagaggcagacaggagggtggtggcagcaacactgcagctgcttctggatgctgctggggtgctctccggagcgggtgtgaacagcgcacttcaacatgagcaggcgcctggctccggtgtgtcctcacttcagtggtgcacctggatggtggaagccagcctttggggcaggaaaccagctcagagaggctacccagctcagctgctggcaggagccaggtatttacagccataatgtgtgtaaagaaaaaacacgttctacaagaaactctcctacccgctcgggagactggggctccttgcttgggatgagcttcactcaacgtggagatggtggtggactggtccctgaaaagcgggccttgcagggccaagtgaggtcctcaggtcctaacccagtggccctctgaaagggggtgtgcaggcgaggggagcaggaggcttctctctagtccctttggaggctttggctgagagaagagtgagcagggagctgggaatggtccaggcagggaagggagctgaagtgattcggggctaatgcctcagatcgatgtatttctctccctaaaagtgggtagaggagaagaggggaacacggagacggtgctgagttgaaggtgtgagcaccgagaggaaggagagatggaagcagaagccgatgaatttggtgggcagcgttggggaggaagctaggatgggcatggcaggccagggaaggagggcggcccccgtctgactgcactggtgaaatggccacacccagagccacgggcattggtcaggaaaaggtgatgggacagggtctttctcagtcttcctccaagctccctcagccacttgcttggccctgccatctgtgagtagtgttaagaaggcaagatggggcctgctccctatctctgacaaagagggatgaaggatagagagaaccgttagtccctactgcccccggtccctgaggatgtggcaggctctggccacaggaaccgcctcctacctggtctcccggagccctcttgtcaccgctgctgccctgcaggaggcccatctcttctgggagcttatctgacttaacttcaactacaagttcgctcttacgagacgggggcagcgtgctgggaggagggagggaggtgagaggttggtatctcagggccacaggaagagaagggcccgctgtgaaggatgtggaatggatgagggctccttgctccagggccagcccagggcagggaagcaggtcatgagaccatgtggctgatggaagctgggcagtgggtagtggagcaggcagcaccctgacccagggccccactcctgctgtcaaggggcaggcgggcgctgggcaggcagcaggctgggtggcaaaacgggcgggggcggaggggccggtgttgggcttacatctcctgcttccctgagcgcctgcacggcagcttgcccttcttatagaggaaatagaggacagcgcccagcaccgccaggaccaggatgcacacaatcacagccacgatgaccacgccccggctctccggctccggcagctttctctctgcgccacaaagacactcctcgtcactccctgccccaggccacttcgtcaccatcgttgccccagccagtccagggccgacaagatggggctgctactcacctttctggacagggctctctggggagggacagggcagaaaggatgccctggcacagccctgttctcttgccaggcctggcttacctgtggaggtgctgttggctctggtatgaggactggcagtggaagtgctgaggccagtggttgtgttggagtctggtgtgagggtggttaaattgactag

SEQ ID NO: 1015 - DNA, 863 bp, Homo sapiens; identical to SEQ ID NO: 1010

SEQ ID NO: 1016 - DNA, 1292 bp, Homo sapiens
tgcagctggaggccaattatcgtaaacgaattagtgcaggaaccagaataccaaataccatgtgttctcacttaccttacccctaaaagttagatgcccttcctccatactcccacagtaccctctatatttttacgagtcattatattcctctttactttgtgagccccttaaaagcagagaccgggtctgttttactcactggtatgtcactacagtgccaggctcattgtttgcattcaggtggttgttgaatgaacaaactcaaatgtaactgcctatttacttgtctgtctttcctcaacaggctgtatgttccttggtggatggatctgtggtttattaagctttgtttcttttagcatttagcactcagcatgaagacctagcacacagaagtttattgaataaattaaatttgtcaggattaataattaatctttaaaatacagtatatagcattgaagaatatatagaaagtattctcaagatacagagagacatgggttgctcaggattattcctttgtgtttcacttataggaaagatctcatactacagactacaaatgccaaatgacctactgtgctcataccacccttaacctagaaataaaatagaaacaattcctaaagaaacagtcttaaaaataaccagctaaaattttatcaacaacaacaaaaaagtagttggggtttctgctcattaaattagtttgtatgggtaagcaccacctaagtttcttgattcatggcatgtgttcttaaaccaatttactatccactaaaaataaatggtgatcattatataaaaagcagttgtatttcttgacactagcaatgaaccatctgaaaatgaaattaagaacacaattccacttacagtagcatcaaaaagaataaaatatttagaaataaattaaaccaaagaagtgtaagacatgtacactgaaaactaaaaaacacagttaaaagaatggaaagatagcctatgttcatggattggaagactgaatattgctcagatggcagtactccccaaattgatctacagattcaatgcaattcctatcaaaattccatcttcctctttgtagaaatggacaactggtcctaaaattcatatggaaacttaagggaccccaaataatgaacaaatgttggaaaagaagaacaaagttcatgggttcacactttgacttcaaaatttactacataatcaagacagtgtggtatggtctgtcataggacagacatatagaccagtggaataaaattgagtccagaaataaa

SEQ ID NO: 1017 - DNA, 1292 bp, Homo sapiens
tgcagctggaggccaattatcgtaaacgaattagtgcaggaaccagaataccaaataccatgtgttctcacttaccttacccctaaaagttagatgcccttcctccatactcccacagtaccctctatatttttacgagtcattatattcctctttactttgtgagccccttaaaagcagagaccgggtctgttttactcactggtatgtcactacagtgccaggctcattgtttgcattcaggtggttgttgaatgaacaaactcaaatgtaactgcctatttacttgtctgtctttcctcaacaggctgtatgttccttggtggatggatctgtggtttattaagctttgtttcttttagcatttagcactcagcatgaagacctagcacacagaagtttattgaataaattaaatttgtcaggattaataattaatctttaaaatacagtatatagcattgaagaatatatagaaagtattctcaagatacagagagacatgggttgctcaggattattcctttgtgtttcacttataggaaagatctcatactacagactacaaatgccaaatgacctactgtgctcataccacccttaacctagaaataaaatagaaacaattcctaaagaaacagtcttaaaaataaccagctaaaattttatcaacaacaacaaaaaagtagttggggtttctgctcattaaattagtttgtatgggtaagcaccacctaagtttcttgattcatggcatgtgttcttaaaccaatttactatccactaaaaataaatggtgatcaatatataaaaagcagttgtatttcttgacactagcaatgaaccatctgaaaatgaaattaagaacacaattccacttacagtagcatcaaaaagaataaaatatttagaaataaattaaaccaaagaagtgtaagacatgtacactgaaaactaaaaaacacagttaaaagaatggaaagatagcctatgttcatggattggaagactgaatattgctcagatggcagtactccccaaattgatctacagattcaatgcaattcctatcaaaattccatcttcctctttgtagaaatggacaactggtcctaaaattcatatggaaacttaagggaccccaaataatgaacaaatgttggaaaagaagaacaaagttcatgggttcacactttgacttcaaaatttactacataatcaagacagtgtggtatggtctgtcataggacagacatatagaccagtggaataaaattgagtccagaaataaa

SEQ ID NO: 1018 - DNA, 184 bp, Homo sapiens
gctcatgcctgtaatcccagcactttgggaggccgaggcaggcagagcacgaggtcgggagatcaagaccatcctggctaacacggtgaaacctgtctctactaaaaatacaaaaaattagccaggtgtggtggtgggcacctgtagtcccagctactcgggaggctgaggcaggagaatcgct

SEQ ID NO: 1019 - DNA, 7932 bp, Homo sapiens
acttgcaaactaaggggaatgagcttccttctgaatgtttatgaaggagaggccactgtggtaatgttaaaattaatacacttgttgtatttaggagctaaaagtctcagatgctaaatgaggactgatttgctttttatttgatcatatacctatacatgtgcaaaaaaaattaactacttgttttatagtttctttggggaaaaatagtttaaaattcttatcagttttaagaaaagttattttccagccatagttcaatagctcacaaatgtaactgttactaaaaaaataagtaataaatagccaaaaactggtggccaaagatccagtaaaaaacatcctctttcactcataaatcaacgaaatagtcatgaagcacttctatgcctataaaaatagattcagcaagtctttaaaatatttttgctagaattcacattaatcttcccagagaatactcttatttatactgttgaaacatacataactaaaattgggaatttgtttagaagatatatataactaaaactgagaatttgtttagaagatgtcttatgatttgcatatatgtaaaataaacaaccatgtgttccaaacagttatcccattttgacatccaactgtatggaaaacttacttataatttaatcttaaacatatatgatgcttcaattttcaaagtgctttcatttgataaagcatttatttgataaagcaagggtatgtaacaaaaatattcactatgtaacaaaaatagtaatttccctaatttgtgtttcatttgaaaaatatgattttgatattaaatgcagggtagtgattcataaatagttttttaaaggctgtttggtttagaaaatgtcatttaatgtactctattaataaaattacaggctgtgtcattctagtcatgtctaacagctggtgacacctggagctagccaggaaaatgtctagtgaaacagatgggcttagccccaggccttgaatggaacaattcagatgctgtccaaccctcccaggtgatgggaatttcaaaaggagattaactcctcagtattaaaataccttgccctgttcccattattcccatctagaaaaagcatgctagaaagtaacaacaaaactttgactttaatagttataaattattatgaaaattatcagttagttgaactcggataactcctcactccttttcattcctagaggatagacagtgaagtgcaactacagcccgcaaatgaaaatgaataatattaatccagcccctcaaggcaggcgagtagctgctggtttgtaatcttgaattaaagtttttttatacacaggtttttcggtagacaaattcagggacattttagcagaggaaaaaaaataagcaaaatagtcgagatatcattgttttacaaaaataaatcccattttgcctacagcaatttttttgtttgttttggtatatcattcatggttcttcaaaggtaaaatcacttaagtcctaactgctttccttcagtgtatgttgttaggccattggaatttaccacaaactgctatttcttgtaattctctatcgaatggctccacaatttctattcaaattcgatctaggatggcttcttttcataatatcctgagtgaatagtaaacataggaaaaggaaccagtataaaaatataccagtatgaaaaataaaaaccagtataaaaaagttattttttaatggcaaagtcagtactaaccaagagtattctttagtgtttagagatagccaaaggttgaatttaagtttcagtccttatgccagagaaatatattctctcaaaatattttttgaaaatcctctgcttgtctatggaatgctttcaaataaacctctttcccccgtctccctcccactccagtcatctgtcttagagctattggaatcctggatcattgtgggaaatgaaaggtaagtaagtacatgcctatgatttgttgttggtaagtgtggcgtggggtccaaggaatggttcgtttaaaaataaggcagaccacgtaacttttttttttttgagacggagtctccctctgttgcccaggctggagtgcaatggcgcgatctcggctcactgcaacctctgcctcacgagtacaagcaattctcctgcctcagccttccgagtagctggaactataggtgtgccaccacactcggttaattttgtatttttagtagagatggggtttcatcatggccaggctggtcttgaactcctgacctcgtgatccacctgcctcagcctcccaaagtgctgggattacaggcatgagccaccgtgcctggccgatcacataacttctttttttttaatttaattttattttattattattatactttaagttttagggtacatgtgcacaatgtgcaggttagttacatatgtatacatgtgccatgctggtgtgctgcacccattaactcgtcatttagcattaggtgtatctcctaatgctatccctcccccctccccccaccccacaacagtcccgagtgtgatgttccccttcctgtgtccatgtgttctcattgttcaattcccacctatgagtgagaacatgcagtgtttggtttttgtccttgtgatagtttactgagaatgatgatttccagcttcatccatgtccctacaaaggacatgaactcatcattttttatggctgcatagtattccatggtgtatatgtgccacattttcttaatccagtctatcattgttggacatttgggttggttccaagtctttgctattgtgaatagtgccgcaataaacatacgtgtgcatgcgctcacataacttctaacaatatttaccacattggacttgaaaaattataccttgctttatataagtactgtagtaagcttgaaaacacaataatacagtatacaaataaggttttaaaataattccttttctactttagttatataattattaatagatagttttaaatttccaagaatcattaagtatacatttttaaaaaatatttaattttctattcttttctgttgtgaatggttttgttccttgggcatatagggatcttgctcattataacagactatgagattgttgtatttttctcttaaagtactgtagataactcaatagagctgtgtgttacaattaaccagtagaacataatatctaagtcttattcaatatatttgggttcaaattacactgttagcatttcaaatagtgccaattctgttgactcactgcagaaattcctagaaggaaatataaaaacagacaaatgagaactatgcaaaatatcaaaagccatcattataatatcaactttttctgggatttcttttcataatttcctttgttctaattacctccatgttggagtcatgttggggtcaacatgaaagccattataaaaatcaaacactattccagtgtttgatgctttctttgtatgcagtacattccaaggaatggaaggaatcacagcagtcaaccttggtgtaggcaataaggggtgcattgtttacagataatttaaaaacaacaaaacctatgaaaactcagcctgcttttatcagcagcaatgacagtgataaaatacttctccttatcgggcagaggctccccagtaccctacccttggtgtacttctgccaacataagctcaaaagtactacatgcccaatgcttttgagatgcttattgcaaatggatctcattctcacctttatattttcaatttctgaaaatataaatgtagaagaatatattaccagtgttaatcaaggcagcctataatctgttacaactttaaatgtttaaaatatacataatgaatttttttaaaaagtccagtgaagttgagagaggaattgtggacataagtaactttctacctgaactttcaaatactgataccccagtgctttaaagtcacgagtaggtgcctaaggaaataagtgaaagatcaaaatatgtcatacttgcatttaatgtatgagaatttgttttgaccacagaaccgaactcccactaaggatttcactccctgatagtcattccaaaacttagtataagacttttatttttttctatataaggaatttagtctcaaataagcattcctcactttactggcctagactgaacaaggcaatggctagtggcaatctagtccacaattaatgaagatcatatttttgctgactccttggaccctgggttcatgaagatatgaagaattgaggcaacgacaaaaaaatacattaacaaaaagaaagcaaacattaaagcacaaaagcaccttcatcaatgttctcaccacctgtggttcccaacataaagaattttccatttctgttagctataacactctagagttaggaaagtaactagtactttacaaatatttttcctttcaaatgctttattacagttaagaggaaaaaagaacataatgaacgaaaaaaagaaaaccacaaacattttatatacatgcaaaaaggcaataaagtgacaaaatgtttagaaaaagcatgtgaaaaagtaaaatcattattagtatatgtaaaaaaataattttacttgccttgggtaggtgtctaatttttttctttcctttgtgagaacaccgactaaactagaatgaccagaggttcatttccagaatatattattcacgacgttatttatatgtgtgtttgcatatgtggcatgaaatgtcatatatataaaggatatatgtttaaccaaaaggaagaaaaacaccatacctttgttatttagaaatcaactcacaattgcatagtcaaacctaatcattgttgttttgatataaattttcttgctttattagtgagttggctttgaggaaatgtgtatttccacaggtaaaacaagtatgtgttaatttcttgagcaagtaggattccagtatcagaatacattcttaaatgaattattcctaaataacgcatagcacattacttaatcttataaggaacttattattaggatcttcattaataaatatttatttataaatattgctgtgcttgctaagggcactgacctttggccattatatatatctatatctatgtatatatacaagtgtatctatatatacattatagctatataatgatatatcatgatataaaatatgatatgaaataatataaagtgaaataatgtaaaatgtataacctatatctatatacaagtatatatataatactatatatatacaagtgtttatatacaagtatatataatggtaaaaggtcagtgccttcaacaaagcacagcaataatatatttaaataaatatgtatttattaacaaagatcctaattataagttccttgtaagattatgtgctatgccttagttagaaataattaatttacacatacttgttttacttatggaaatacaaacacatttccttatatacttgtatatgtacaagtgtatatacatatatatatatgaaatatatataataatggcaaaaggtcagtgcatttatacatatttataatgtgtatgttttacctttggtttgtatgatttatatttatatataaatgtacataaatttataaaaatggaagactagctggaaaccagaatctgacttcaaacagttcctggtaaaaataaaatttcccagttaagtttgtaaattagttttttgaaatttagaaaatagtatctcattggaccaatatttataaattgtttcattcccaggtaagtccacagaaatctatttaatttaaataaattttagtaccatgcttaagagatattttcctttttataagtttgttttgttttggtttgtttcctaaaggaactggtttttagcaaggagaccaagaaactctactccctaggggctagcaatgagagaaaggaagccttaagtctttgagcacagggtgacagtttgggtcctatgtgagatgatcaaatccacagcaacagaggaaaggacaaaaggaaaaggtctgtagcagcactacatcagaaaaaaatggattcagcaaggaagtgggtgactctgagtaagcatccatgtcaggatggttttgctacagcccccaacaaaacattaattagtttaagaaactcaacttcggtttacaagtgttttggaaaagtaacaaagaacaacataagtaacaaaataattcctcaggtcattacaatggatgtttcctataactgaaaaatatggttaaaaagtacaaactacatttggtgtgcaaactgtttagttcttaattccaaactaaattgtacattatatagtaaaattttgaccagaaaaacttggagattttagtaaaaatttcattgacatatttacagccccagtgtagtttggccggtgtgcaaagcctgactaaggaggttatagaaaaaaatatcagacttaagcccatcaaatcattaaagatgctttggcaagacttcaagctttacagacatactccatgtgaccagagatgtcataaccagtgttctttctcttgaaatgttagaatgctttagttttattctataatttccgtgttccatggaacagcattcatttctcccagttttagtaacataatgagagatatattgagtgtatagagcaggaaagacatgaaaacttatattgcataatattagcaaacataaaagatagcattataaatttttaaaaatccaaaaaaattccagaaacagaacagtgagcatgtttaaaaagtcaggactgaccgtttctgtgagttctgaggactgtaaatgagcctcaatccataaagctgagaggttgtcttagcccacatatgcagcaggtgactccctctgacaaaagcaagatttagctggatcttttaaaaaaaaaatatacttgtatttgagaataacaataatatagttatattgtaacatacttttatgatgtacatttatattatataataatacatacttgatagatattttagtctattactagttttaatcttcaaatatgcctggaaaaacatttaagcgtatttataaatatttaaatgttatcaagtattggaaaacatgtttgattactatgggaatataaactaaaactccccaaatatatatagaagatgtacacatctatagcatataaaagaattagggattccttcctccccttcttcctttattctgaggaaagaggtagtgaacttgagctttagtttttaacaggttagaaaaaggaatctttttacatatctactaaaagttctattattcaatgtctaagtttttaagtcccttggtttcctagatacttcgatggaatcagcagccattgatccaatgccaactccaagactggaacgtcgcaatgatagttccaaggcggaaatttgacgtaattcttttcgacacagttttacaggtgtgacaccatgaagtcgtcccacatttcccacaacctgaatttgggatgacagtcgactgtgagattttgtaaactgattatcatctgtttctgttttattctcattacctaacatatgcccactggggggtgctaaagaactatgaattggaggtaattctgggatatcttcccagagcttttgaggatttggctgtgttcttaagctgcttgctgaactgtccatttctctttctcttccacttaatttcatactttcaggtctggatgcccattttaattcttctgaaagcatgcctcctccttctggcttcaggactccatctccagcctcttgatctaaaaataatccccaaaccaaaaaattagatactatttcctcaaaattaggtattttaatcaaaacatcttaacataaatacattattatcacccaatatg

SEQ ID NO: 1020 - DNA, 835 bp, Homo sapiens
ggcatcattcacgctagaggactggttcgggagtgcttggcagaaacggaacggaatgccagatcctagctgccttgttggttttgaaggatttccatctttttacaagatgagaagttacagttcatctcccctgttcagatgaaacccttgttttcaaaatggttacagtttcgtttttcctcccatggttcacttggctctgaacctacagtctcaaagattgagaaaagattttgcagttaattaggatttgcattttaagtagttaggaactgcccaggttttttttgttttttaagcattgatttaaaagatgcacggaaagttatcttacagcaaactgtagtttgcctccaagacaccattgtctccctttaatcttctcttttgtatacatttgttacccatggtgttctttgttccttttcataagctaataccactgtagggattttgttttgaacgcatattgacagcacgctttacttagtagccggttcccatttgccatacaatgtaggttctgcttaatgtaacttcttttttgcttaagcatttgcatgactattagtgcttcaaagtcaatttttaaaaatgcacaagttataaatacagaagaaagagcaacccaccaaacctaacaaggacccccgaacactttcatactaagactgtaagtagatctcagttctgcgtttattgtaagttgataaaaacatctggaagaaaatgactaaaactgtttgcatctttgtatgtatttattacttgatgtaataaagcttattttcattaacaatttgtattaaaatgtgggttccttgaattctta

SEQ ID NO: 1021 - DNA, 9151 bp, Homo sapiens
ttccggctctttctcctgcagcaagacttttatttaggtgtcgggactgctctgccacagctgcccacctggggcgcgtccctgctggccgccccgtcacggcccgaaccagctggggatgccgccccgccgcgggtcgctgctctgccacagctgcccacctggggcgcgtccctgctggccaccccgtcacagcccgaaccagctggggacgccgccccgccgcgggtcgctgctctgcctctgctgcctctcctcctcgagcatgctgtagaggtcgtcggcagtgctgccttcagggctctcgtctttctcgggaaacagatctgggaacgtgaaggtctgtccatgggcctaagggggagaacaaaggctccagccagagctgcaaagactcctcagcagaggggtctgtgggggagcctcatgctttctggcagcccctttctgccggcgccggattcaactgctcagaggtacctccctgggcctcctggggcagcgtccctgcctggaatgtaagcacccccacggccaccggcccccggctgtcacgctgcagcagaggccacagctccaggacagggccgctttccccaccattgtctctttagggcctggtgtctgcccccgccctgggtgcacccatttactagcacggggccacctggttggtggggggcagaaacaaggcatggaaaaacatgacacaaatcacgtctggtaccatgctgaacctgtccatccaaaatgcctcaggctctactcacattaaagctccccctcctcccagcccagagcctggcaattaaagtgaacatcacgtacgaagaaacatgcacgtgcggcagctgataaatcaggaccggctctgccaattaactggtcttacatcttctgctgagagttcagaatatgtccgtgtcagccaagccccagcccaggccacagcatgtggctcgggttcacgagaaggaggggatactgctccttggggacctaagcaaatacaagaagccatcttaacttgctaatgattactaagtgctccaaagctaagaggcagaaagagcagaccagaggagagggaagagaagagggaggaggagtgaggatggcacccgaatctggaaccctttagtgagtaaaatcagtcaggtacacttggctcttgcagaccctttgtgtgtaaataaatctggatgtgggcaggcagccaagtatgatctgaaacaggcccagatcccaccctgcgagggaggtgtatgcaccctgatccctggcgcagagcgcaggggctggcggggagagtggcactgcgtgcgccgtagccggcctgcaggaggattgccttacacagctctgaactttgcgtcttttaaaataccaaggggcagtcgtttacacgtgaggctgactgcccagaatgggagattcaccttgactatatggaggtgattctgctagttttccgaggcaaggggaacccaaaatgacagtttaaagcacaaacatggccatttgtcacagcttcgggaagaaatggggaaaggtgctgagagaaaatccgtttcttacaggagacaaacaccgtttggggatgccaagcatggtttcccaggggcttcccctttctagaagagttcaccttgtacctaaaaaaaaaaagcccttgatccttccaaaaaggagagagacagctgatcggggtaaagaacaggaatggagaaaaatgtcccaatgacaagtaaacaaggcagccctgccttcaggaatcccagggcgccctgggggctgccgcctgcctggacctggaggccggagccccgagcacggagctcggcccagctggcggcagcggtttgttctggagttgcctctcatgtcgtgcgcccttcattcctgcgcgcccttcattcctgcgctgctcagcatccacacaagcctcggggcagcgggcagtcaatggtctttttgttgtgtgggtcactgaggcgctgctttcagctcccaggactttgggccaaggagatgcttatcaggttgtcggagaaagaaatgtgggactcccgccacgtgggacagggcctttccacagcggccaactccaaataacgtggataattttatctttccaatgctccctccctgggctttgcaattagcagtgattctaagccctggcgcagggcccagggggacacgctgagcaaggtctcagcagacacgagacaggaaagggccttgagagtcccctctgcgggcagacagggaccaacggccacggcccatttctaggctgtgcaaagatgtgctggagttcaggaaggggggtgaggacccgttacaaattttcattctggaacaggaggatccatgcccaactgggacccttcaggctcccagttgccctgccctgtctctggctgcctggacttcacagagggagaacaacacgcgggcggcagctgcagacaccggatcccggagctgctgggttcagttttcatgggaggtggggcccagaggaagaacgcaagggctcggatgacttgaatgccacttgtaaccgtagctgcctctgaagtgcccgtggcggtgccggcacacgggatgtccacccacatgccatgacaaagacagatgggcccgactgacactgagcacacagaggcctttatgaggccaacggctgctctccccacctggattggctgatttcatgcacagcaaatatcaggccaaattattccgggggcccctgtttagaacaacaaatgtgactgtttttcagaaaagctgccatgctaacttggcctttttcacaaactgcctccttagccccacaacaggccggctggcccaggaggcggtttccaccatcgtgtgactgccatctagtggcagggcccgccggctcggcctccagggaccatttacaccggaacacaaccccatccccacccagtaaggccagccccaggggcagagtggggaggcccaggaggtggccggggcaggctgtggacatcttggcccagagagaaagtgcctctgggtttgcctgggactcaaaatgaagagcccaaagaaaggctttgaaactgtgggtctcactcctgacaagtctgggtttcagaaactgaaggcccaggcaacgtggggtgagggttcttcctccccagagccccccaggatacgtaagaaagcacctgctcagaagcagcctgctgagccctaacaagtacgtgggacctgctaccctgcaatgcaggacatgggcctcagccaacagcctggccagccagacctgccttggcaccaaagacctttgccctcaggggcctcacactctgcctccgaggctgaaacccagccaaggacaggctctccagaggccggggcctcccatgctctgacaccctggtgtgcgttggagttgaaacccactaggcctgtgatggctgcctttgcccacagagaattcaaacttcaaaatcacaaaacggccggacgctgagacgtgccccatgtgccccagtgctcacgtgctcccagcgccaccactaacacccccaaggccgtgacggagcatgaccttatgtggagcctgcctctgcgctgaggccctgagatccggcctcacgggggctccctgggccccagcgcagcgtctccggcacaaacatccccaaggacacagttgcgaggagcccctcggaggccccgctggggctggccagctcacacgcaccagctgcacgtaggcgaccttgtagtccggcttcttgatcctcacgtttctgtgatctcttctcttgttagagcctgccggaagggagtgaaaaaaaaatcagaactttaaaaaaatcagaactttaaaaaattacatcctcagaggtcaatgccactaaaacgaacctctgctctcttaaaaatgtaaatatgtttttaaaaactcaaaaaggcgatttctcagggaaatgggcactgtaatcaaacgagccagcacagcaggctcccaggctcctcccttctcccaacagaggccagcaggttctcaacaaaggagcggacgtggcaccagccagggcacacgacaggggcttatggaacagacagcgctttgctccccagcctcagccactgcagtcccacctcgggggctgacggcaggagtcagggctcagaatggaccccgggccagcccagttgaattccaatccctgctctggcacgtaagcaccgtgtgaccctgacaagtcaccctgtgcctcagtttcccatgagccacgtcagaccaagacccccatgcagtagctgaggctgtggctcggcgaggtgggcatgtggcacagatgggcacgacaccaacaggagaacctcccatgggcactcaccatgctgcacccgtgtccgcacagcagccacgggcacgttatagatgccctcgaggtaattcctgaggtccacccttgtcattctggaggcgaaggagaaagaaaacggcatcttaaccaggctaaaagccaaaaatactgtcccagatgcacaagcacccgaggctgagaggccgacagaccaagacccacagggggcagggaggagggctgggtacatcagcggcactagtggggccaggcagccccagcaacaccagtgctgctggctgcaagactccctactctgggcacaccagcatggggtggcagtggcacagaccccacagagtgggagcactgcccaaccaacccctggcctgctccacagccccacatggctccctgctccgggcaagtgcctgtgagaggaggtgacagtctctgcacgctcctggctggcaggtgccccacctcgtctgccccggggcccagtggccgcatcagggttaggcctgctctgcggctgatgggactgatgaggttctaggaagtaccttctggaaaggcctgcctggcattcggtgcgttaactgcaagttccctctactgcagaacctcacggtcactgtcaactcagcttctgggcccctgcaggctgcacaggcctgaccttcgcccccaggggagctcacgctgctgccccgcctggctcgcgtcaaccctgagctggggacctgtgaacttaaacactgcagagcagcaccccagttttgctcgtagggactgtgcatttctctgaaggtcaagcaggctcttctgagcggttctgtacatcacggcctgctcccaacccagcctctcagggcgcctctcctaaaaagaagctgcaagaactcaacagaagacgcgagcacagaggtccaaattttaaggcttccagtgaagccgtccccgggtggagggcggcgtgcagcctgcctgccgggctccacacctacagggactccatcaatacttgccgggcagggccgcctgaggtgccttcccagcaggaagaggctagcacgtgagcagagttgttttaactcaggacccaggcccccctgagggcactctcccaacccagcgggaaaacttccgggctcactccacggggatccccccgagggtgctccccaaccccagccggaatcctcccggactcactccatggggatccggaactgcacggtgtcctcgggctgggccacaccgggccgcaccagctgaatgaagaagttggttcggaacacccgaagttgtgggccacccagccggtacagggggtacctgtacagaagagattgggtccatgtcacacacttaggccaaggcagcccgacacaccaaccctgcagacctccgagtgtccactcacaacagggtgggcagaaaagggggtagctaacactgcggatccctgagtgtccactcccaacagtggtgggcgggaaacagggtagctaaccctgcagacccccgcgtgtccactcacaacaggggtgggcgggaaacggggtagctatcagcaggtcaccacccaaggacacagaggtccccacagcccctttctcacatgggcctgccaaggtggacggccagtccctagcatcgacttaaggagcatgcgctgttgacccccaaggtcagactttagaaaaggccaatggacaaaaatcagaaccccgcagacagcattcccccaataagctgatggcaaggctcaaagacgtgtgttggggcactgatacccctgggagagcagaccccacgcggccggcccactctcctgctgctcgggtgaagtggagctgcagagaaccacacaccatgggacagaaaaggccagctccgcactctcccggtggcagcagggcctagctcctcggtatggagaacgcaggctaaccaggcttaggctcctggaagacggtgctgccaagactctgattcagtacactaaatgtgagttgagtgcaccacaccccagcactccactaaaagccagcagaggcagatggagaggtgccaagtggccaccgcaaactagaccagcacgctgcctgggctggggggccaggtgacgatcgtgcagaatctctagccagttggtttcgtgcattctcccacgttcagctgggtggacaggcagcaccgtcctaccgtcccccacccccgttcccgcccctgccactgccggcacaccctggctctatctgggcctcagagctggggggaggaggggcacaggagaaactcaggcctgctgggtctcgggggatgtggggtctgagagcctaggtgcaggtcttggtggacggggagcacaggggctcttgaggggtctctggtggccttatctgaggcactgcacatggccctggccttgggagcacccagcaccaagttaagaggggctccgtgaggccaacgctgccccaggcttcacatgaatttcacgctggcctctgcctgtctagggaagatgaggaggaagtgagggtcagaggccttgggtggggtgttcctgaagggccaacagtggtaggcagcactgagcctctgggcccgagggcctggcaggggccaggagctgctgggacctctcagaggcaaggcgcctgtaacaaagcccgatcactaatcatgtccaccccaggcctcctgatgaccacactgacacatggcagcctggtggccgggccagtggggctgagtcttcactcacccaaccccagcagagcctcctcttgggcatggccttggcctttccaagcctcagagtgcagccttcaggggtgggccccagtgagaggccgagaagaaagggtgggctctggaggtggaggggcctgacttgttttacccacaggttcaggctagccatggccacccgaggggctcacacattccctctggtgaccagctgtgggactgcaggagtggagacaaagtttggggactcccagtaaacagtagaaaagagggttcaacagctcccaggccattaattttcgagtctccaggcttggggcctgaagggcacactttgctaagggtctgaagggccatgtgtgggcttgagatgagaggctggcaggggttgggccaggacgattcactgtccttgttcccacaggccgagcctctccaggctggagcgccagctgcctgtgcatggagcctgcagatctggaacaatctgcactgtcgacacccagggccccaggacagggctctaaggcctctcttttgttctcgaacccttgtgggcccaccagccctcagttccctcagtcccactctccccagggagcaccccaagcactccgcatgggatttcacaagcacctccacggtaacctatctcaagtagaactctgcactaacttcttcctcaaaacacaaaaacttggctcactgccaccagcctgcctccccacggccccacgagtgactcacccaggatcccaccctctcggcacccccaccccagctgcatccagtccacagcaagtccagtcagcgctccctgcaaaggctccctggcaacaggagtgtgtgcactgctgggcgagcgggccccgctgcctccaaggcaaccacacctgatccgtttccaggggcccaccacccttggcccttcaggaacaccccacccgggtcctctgaccctcacttcctcctcattctccagggacaggcgaagggccagcgtggaattcacgtgaggctcagggcagtgttggcctcactcagaccttttcttccttggtgctgggtgttccccaaggtcagggccacgcgcagcaccggtcccaggtgtctgctgaaggaagcctcctccactgggggtcccacctgccaccctcccctctctccccagctatgtgcaggggcctccaaagccacaccctggccccttgaccgtccctctccagaaacactgattactgttctccaaaacccacccgggagcccacatctactgattacgcctgagtcattcgttcaccaagaaatatgcagggcttcctgcttcaatttggggagggcgaagtggtgcaggacagcgccccgatggccccctgggaatccagagaacatgcagagtgggcgtggggggtctgggctgagcagaaccgggcctcccgccctgcctgccccaaagccctgagggctgcggtcagctgccctttcccactcaaacccaatctggattcccagctcctctgcctcaggccgcgcccgcgctgcggtgggggccgcccgggcctccccgcctggacccaacagccgacgtggcccccgccccgtgacgatcagaaacgtctccaaacagctccctcggccctggctgcgggaccagccccgggcctgaccccgggccaccctcccactccccacgcgggggcaccgtggcctccatgggtttggctcggaccctctgtccccagcccggccacgcccgccccctggggttgccctaaacctggcggggggctcctccgccacccgcctcgcgtgtctcaaggcatgacagggggtcccggagaaccctgcctcgcccgggccaggaggcggcccagggacgcccaccccgctccccggagtccgcgcgccctgtggggtccgtctgcttgtgacactaaggggcgccccgcgacgggggggtgacgacccctactcacaccacattccgcgccatggcggccacgcgcgcttccggg

SEQ ID NO: 1022 - DNA, 9273 bp, Homo sapiens
ttccggctctttctcctgcagcaagacttttatttaggtgtcgggactgctctgccacagctgcccacctggggcgcgtccctgctggccgccccgtcacggcccgaaccagctggggatgccgccccgccgcgggtcgctgctctgccacagctgcccacctgggggcgcgtccctgctggccaccccgtcacagcccgaaccagctggggacgccgccccgccgcgggtcgctgctctgcctctgctgcctctcctcctcgagcatgctgtagaggtcgtcggcagcgctgccttcagggctctcgtctttctcgggaaacagatctgggaacgtgaaggtctgtccatgggcctaagggggagaacaaaggctccagccagagctgcaaagactcctcagcagaggggtctgtgggggagcctcatgctttctggcagcccctttctgccggcgccggattcaactgctcagaggtacctccctgggcctcctggggcagcgtccctgcctggaatgtaagcacccccacggccaccggcccccggctgtcacgctgcagcagaggccacagctccaggacagggccgctttccccaccattgtctctttagggcctggtgtctgcccccgccctgggtgcacccatttactagcacggggccacctggttggtggggggcagaaacaaggcatggaaaaacatgacacaaatcacgtctggtaccatgctgaacctgtccatccaaaatgcctcaggctctactcacattaaagctccccctcctcccagcccagagcctggcaattaaagtgaacatcacgtacgaagaaacatgcacgtgcggcagttgataaatcaggaccggctctgccaattaactggtcttacatcttctgctgagagttcagaatatgtccgtgtcagccaagccccagcccaggccacagcatgtggctcgggttcacgagaaggaggggatactgctccttggggacctaagcaaatacaagaagccatcttaacttgctaatgattactaagtgctccaaagctaagaggcagaaagagcagaccagaggagagggaagagaagagggaggaggagtgaggatggcacccgaatctggaaccctttagtgagtaaaatcagtcaggtacacttggctcttgcagaccctttgtgtgtaaataaatctggatgtgggcaggcagccaagtatgatctgaaacaggcccagatcccaccctgcgagggaggtgtatgcaccctgatccctggcgcagagcgcaggggctggcggggagagtggcactgcgtgcgccgtagccggcctgcaggaggattgccttacacagctctgaactttgcgtcttttaaaataccaaggggcagtcgtttacacgtgaggctgactgcccagaatgggagattcaccttgactatatggaggtgattctgctagttttccgaggcaaggggaacccaaaatgacagtttaaagcacaaacatggccatttgtcacagcttcgggaagaaatggggaaaggtgctgagagaaaatccgtttcttacaggagacaaacaccgtttggggatgccaagcatggtttcccaggggcttcccctttctagaagagttcaccttgtacctaaaaaaaaaaagcccttgatccttccaaaaaggagagagacagctgatcggggtaaagaacaggaatggagaaaaatgtcccaatgacaagtaaacaaggcagccctgccttcaggaatcccagggcgccctgggggctgccgcctgcctggacctggaggccggagccccgagcacggagctcggcccagctggcggcagcggtttgttctggagttgcctctcatgtcgtgcgcccttcattcctgcgcgcccttcattcccgcgctgctcagcatccacacaagcctcggggcagcgggcagtcaatggtctttttgttgtgtgggtcactgaggcgctgctttcagctcccaggactttgggccaaggagatgcttatcaggttgtcggagaaagaaatgtgggactcccgccacgtgggacagggcctttccacagcggccaactccaaataacgtggataattttacctttccaatgctccctccctgggctttgcaattagcagtgattctaagccctggcgcagggcccagggggacacgctgagcaaggtctcagcagacacgagacaggaaagggccttgagagtcccctctgcgggcagacagggaccaacggccacggcccatttctaggctgtgcaaagatgtgctggagttcaggaaggggggtgaggacccgttacaaattttcattctggaacaggaggatccatgcccaactgggacccttcaggctcccagttgccctgccctgtctctggctgcctggacttcacagagggagaacaacacgcgggcagcagctgcagacaccggatcccggagctgctgggttcagttttcatgggaggtggggcccagaggaagaacgcaagggctcggatgacttgaatgccacttgtagccgtagctgcttttgaagtgcccgtggcggtgccggcacacgggatgtccacccacatgccatgacaaagacagatgggcccgactgacactgagcacacagaggcctttatgaggccaacggctgctctccccacctggattggctgatttcatgcacagcaaatatcaggccaaattattccgggggcccctgtttagaacaacaaatgtgactgtttttcagaaaagctgccatgctaacttggcctttttcacaaactgcctccttagccccacaacaggccggctggcccaggaggcggtttccaccatcgtgtgactgccatctagtggcagggcccgccggctcggcctccagggaccatttacaccggaagacaaccccatccccacccagtaaggccagccccaggggcagagtggggaggcccaggaggcggccggggcaggctgtggacatcttggcccagagagaaagtgcctctgggtttgcctgggactcaaaatgaagagcccaaagaaaggctttgaaactgtgggtctcactcctgacaagtctgggtttcagaaactgaaggcccaggcaacgtggggtgagggttcttcctccccagagccccccaggatacgtaagaaagcacctgctcagaagcagcctgctgagccctaacaagtacgtgggacctgctaccctgcaatgcaggacatgggcctcagccaacagcccggccagccagacctgccttggcaccaaagacctttgccctcaggggcctcacactctgcctccgaggctgaaacccagccaaggacaggctctccagaggccggggcctcccatgctctgacaccctggtgtgcgttggagttgaaacccactaggcctgtgatggctgcctttgcccacagagaattcaaacttcaaaatcacaaaacggccggacgctgagacgtgccccatgtgccccagtgctcacgtgctcccagcgccaccactaacacccccaaggccgtgacggagcatgaccttatgtggagcctgcctctgcgctgaggccctgagatccggcctcacgggggctccctgggccccagcgcagcgtctccggcacaaacatccccaaggacacagttgcgaggagcccctcggaggccccgctggggctggccagctcacacgcaccagctgcacgtaggcgaccttgtagtccggcttcttgatcctcacgtttctgtgatctcttctcttgttagagcctgccggaagggagtgaaaaaaaaatcagaactttaaaaaaatcagaactttaaaaaattacatcctcagaggtcaatgccactaaaacgaacctctgctctcttaaaaatgtaaatatgtttttaaaaactcaaaaaggcgatttctcagggaaatgggcactgtaatcaaacgagccagcacagcaggctcccaggctcctcccttctcccaacagaggccagcaggttctcaacaaaggagcggacgtggcaccagccagggcacacgacaggggcttatggaacagacagcgctttgctccccagcctcagccactgcagtcccacctcgggggctgacggcaggagtcagggctcagaatggaccccgggccagcccagttgaattccaatccctgctctggcacgtaagcaccgtgtgaccctgacaagtcaccctgtgcctcagtttcccatgagccacgtcagaccaagacccccatgcagtagctgaggctgtggctcggcgaggtgggcatgtggcacagatgggcacgacaccaacaggagaacctcccatgggcactcaccatgctgcacccgtgtccgcacagcagccacgggcacgttatagatgccctcgaggtaattcctgaggtccacccttgtcattctggaggcgaaggagaaagaaaacggcatcttaaccaggctaaaagccaaaaatactgtcccagatgcacaagcacccgaggctgagaggccgacagaccaagacccacagggggcagggaggagggctgggtacatcagcggcactagtgaggccaggcagccccagcaacaccagtgctgctggctgcaagactccctactctgggcacaccagcatggggtggcagtggcacagaccccacagagtgggagcactgcccaaccaacccctggcctgctccacagccccacatggctccctgctccgggcaagtgcctgtgagaggaggtgacagtctctgcacgctcctggctggcaggtgccccacctcgtctgccccggggcccagtggccgcatcagggttaggcctgctctgcggctgatgggactgatgcggttctaggaagtaccttctggaaaggcctgcctggcattcggtgcgttaactgcagagttccctctactgcagaacctcacggtcactgtcaactcagcttctgggcccctgcaggctgcacaggcctgaccttcgcccccaggggagctcacgctgctgccccgcctggctcgcatcaaccctgagctggggacctgtgaacttaaacactgcagagcagcaccccagttttgctcgtagggactgtgcatttctctgaaggtcaagcaggctcttctgagcggttctgtacatcacggcctgctcccaacccagcctctcagggcgcctctcctaaaaagaagctgcaagaactcaacagaagacgcgagcacagaggtccaaattttaaggcttccagtgaagccgtccccgggtggagggcggcgtgcagcctgcctgccgggctccacacctacaggcactccatcaatacttgccgggcagggccgcctgaggtgccttcccagcaggaagaggctagcacgtgagcagagttgttttaactcaggacccaggcccccctgagggcactctcccaacccagcgggaaaacttccgggctcactccacggggatccccccgagggtgctccccaaccccagccggaatcctcccggactcactccatggggatccggaactgcacggtgtcctcgggctgggccacaccgggccgcaccagctgaatgaagaagttggttcggaacacccgaagttgtgggccacccagccggtacagggggtacctgtacagaagagattgggtccatgtcacacacttaggccaaggcagcccgacacaccaaccctgcagacctccgagtgtccactcacaacagggtgggcagaaaagggggtagctaacactgcggatccctgagtgtccactcccaacagtggtgggcgggaaacggggtagctaaccctgcagacccccgcgtgtccactcccaacagtggtgggcgggaaacagggtagctaaccctgcagacccccgcgtgtccactcacaacaggggtgggcgggaaacagggtagctaaccctgcagacccccgcgtgtccactcacaacaggggtgggcgggaaacggggtagctatcagcaggtcaccacccaaggacacagaggtccccacagcccctttctcacatgggcctgccaaggtggacggccagtccctagcatcgacttaaggagcatgcgctgttgacccccaaggtcagactttagaaaaggccaatggacaaaaatcagaaccccgcagacagcattcccccaataagctgatggcaaggctcaaagacgtgtgttggggcactgatacccctgggagagcagaccccacgcggccggcccactctcctgctgctcgggtgaagtggagctgcagagaaccacacaccatgggacagaaaaggccagctccgcactctcccggtggcagcagggcctagctcctcggtatggagaacgcaggctaaccaggcttaggctcctggaagacggtgctgccaagactctgattcagtacactaaatgtgagttgagtgcaccacaccccagcactccactaaaagccagcagaggcagatggagaggtgccaagtggccaccgcaaactagaccagcacgctgcctgggctggggggccaggtgacgatcgtgcagaatctctagccagttggtttcgtgcattctcccacgttcagctgggtggacaggcagcaccgtcctaccgtcccccacccccgttcccgcccctgccactgccggcacaccctggctctatctgggcctcagagctggggggaggaggggcacaggagaaactcaggcctgctgggtctcgggggatgtggggtctgagagcctaggtgcaggtcttggtggacggggagcacaggggctcttgaggggtctctggtggccttatctgaggcactgcacatggccctggccttgggagcacccagcaccaagttaagaggggctccgtgaggccaacgctgccccaggcttcacatgaatttcacgctggcctctgcctgtctagggaagatgaggaggaagtgagggtcagaggccttgggtggggtgttcctgaagggccaacagtggtaggcagcactgagcctctgggcctgagggcctggcaggggccaggagctgctgggacctctcagaggcaaggcgcctgtaacaaagcccgatcactaatcatgtccaccccaggcctcctgatgaccacactgacacatggcagcctggtggccgggccagtggggctgagtcttcactcacccaaccccagcagagcctcctcttgggcatggccttggcctttccaagcctcagagtgcagccttcaggggtgggccccagtgagaggccgagaagaaagggtgggctctggaggtggaggggcctgacttgttttacccacaggttcaggctagccatggccacccgaggggctcacacattccctctggtgaccagctgtgggactgcaggagtggagacaaagtttggggactcccagtaaacagtagaaaagagggttcaacagctcccaggccattaattttcgagtctccaggcttggggcctgaagggcacactttgctaagggtctgaagggccatgtgtgggcttgagatgagaggctggcaggggttgggccaggacgattcactgtccttgttcccacaggccgagcctctccaggctggagcgccagctgcctgtgcatggagcctgcagatctggaacaatctgcactgtcgacacccagggccccaggacagggctctaaggcctctcttttgttctcgaacccttgtgggcccaccagccctcagttccctcagtcccactctccccagggagcaccccaagcactccgcatgggatttcacaagcacctccacggtaacctatctcaagtagaactctgcactaacttcttcctcaaaacacaaaaacctggctcactgccaccagcctgcctccccacggccccacgagtgactcacccaggatcccaccctctcggcacccccaccccagctgcatccagtccacagcaagtccagtcagcgctccctgcaaaggctccctggcaacaggagtgtgtgcactgctgggcgagcgggccccgctgcctccaaggcaaccacacctgatccgtttccaggggcccaccacccttggcccttcaggaacaccccacccgggtcctctgaccctcacttcctcctcattctccagggacaggcgaagggccagcgtggaattcacgtgaggctcagggcagtgttggcctcactcagaccttttcttccttggtgctgggtgttccccaaggtcagggccacgcgcagcaccggtcccaggtgtctgctgaaggaagcctcctccactgggggtcccacctgccaccctcccctctctccccagctatgtgcaggggcctccaaagccacaccctggccccttgaccgtccctctccagaaacactgattactgttctccaaaacccacccgggagcccacatctactgattacgcctgagtcattcgttcaccaagaaatatgcagggcttcctgcttcaatttggggagggcgaagtggtgcaggacagcgccccgatggccccctgggaatccagagaacatgcagagtgggcgtggggggtctgggctgagcagaaccgggcctcccgccctgcctgccccaaagccctgagggctgcggtcagctgccctttcccactcaaacccaatctggattcccagctcctctgcctcaggccgcgcccgcgctgcggtgggggccgcccgggcctccccgcctggacccaacagccgacgtggcccccgccccgtgacgatcagaaacgtctccaaacagctccctcggccctggctgcgggaccagccccgggcctgaccccgggccaccctcccactccccacgcgggggcaccgtggcctccatgggtttggctcggaccctctgtccccagcccggccacgcccgccccctggggttgccctaaacctggcggggggctcctccgccacccgcctcgcgtgtctcaaggcatgacagggggtcccggagaaccctgcctcgcccgggccaggaggcggcccagggacgcccaccccgctccccggagtccgcgcgccctgtggggtccgtctgcttgtgacactaaggggcgccccgcgacgggggggtgacgacccctactcacaccacattccgcgccatggcggccacgcgcgcttccggggt

SEQ ID NO: 1023 - DNA, 14886 bp, Homo sapiens
ccggcctcgcacttccggtggggagattccggcctggagctcccagggccgaggtgagtgggtgtgcggccggcctcccggcgcactcccagaggctggggggccggggctggagaagggaagcgggctccccacccgggatctgcgcgggttgacatggggcacgccacgcccctgcccctccccgggcctcagtttcgccgtctgtggagggggcaggggtctccaagcgccctcctgcaaggcacctgccggacgccggctcatctggtatttcctgagcacctgcgacgtcctgggtgcgggacccgggccggaatcggacacggccctgccctctgaggggctgcttcccgcggtgggattggggcgggcagtaaacacgtgagcaaacaaggaaacgtcagaggtgggagtgccacgaggattgggaggggtggggcattggagaaagtattcagccaagcggaggtctgcggaagggagctgaaggcaggaagagcagcaagtaaagaaaaacacaggtttgatgtgtttgacacgtggcagggggccgctgtggcgggtgctgggaccagtggcagaagaatgaggttacagaggccttccttgtggaccaggctgaggagctgggcttagccttagggcatgatctgtttcgtgtgccatctctctggctgctttatagattccaggccttaggggcgaaagaggaaacagggagaccagttagaccagtggcagtcagcaggtgaaagataattgtggcttagactgtggtagtgggaatggagaggaagagaagtagaggggtcaagaagtgtattgaaagtggaactgacagggcaggatttgagaaatgacagaaataagtggtcaaagatgacttcatcatagatttttggttttggcttaagtaaccaagtgtattatgctggcatttactaaatgactttgggatagattgggagcgtgagaaataattacgaaatcttcttagggcatcttaagttttagatatttggagtgcagctaccaaataggcagttagatatatgagtctgatacagaaaaggtcagggctgatgtaaagaatttagaaatcattggcaagtggattgggtaggatgagattatgtagggtaagatttaagagagaagagaagccaggttccaagctttaggcacccaatttttatagattgagttgacaagaaggtgccagcaaaaaagaccaataaggagtccagaaaagcagaagaaaaaccaggagaatgtggtatcgtggcacccaagagaaggttttttctaggaggaggaagtgatccattgtgtaaggtaagaatagagactaagccggcccggcacggtggctcacgcctgtaatcccagaactttgggaggccaaggcgggcagatcacctgaggccgggagttcgagaccagcctgaccaacatggagaaaccctgtctccactaaaaatacaaaattagccgggcatggtggcacatgcctgtattcccagctcctcgggagcctgaggcgggagaatcacttgaacccgtgaggcggagtttgcggtgagccgagatcacgccattgcactccagccttgaaactccatctcaaaacaacaacaacaacaaaaagaatagagactaagccttcgaaggggcagcagggaggagggtgtggtgactcattggagcagtggagatgggctgaagtgagagcagggggtgaaggagttggactggcagtgcggggtcctctggggaagtttcactgttaaggggaccaggaggggagtaagcctctaccatgagccagcatttaatgctgtacctgatgccactttacagttggagaaactgagtccagaggtcaagtaacttagggtcacacagtagtgagtagggacaccaggatttgattctcagtgtctaactccaaagcccacactcttaagcactaaaccatgctgcccaagttacagttaggaagatggagggaagcaggtgtgccagtgatgcaccagccagccttaccttgatgtgactgctgcccccagctaagctgctctctgtggaaagtggggcagaatatggactttccttcctgagcaaatgagatttcaaaaagagttgtttactcctttaaatcttgtttcccttataaaataagggtggggaccttttcagtttcacgtctgtgtctccagtggtgggcctacaggagtgcttgataaatgctcattaagtgcctagatgatctccagggacccttctagctgagatttggctttgtgtttgggcataggtgaccttctgaatcccaataagaaaataagttaaatttgagacagtgcttcttgtaggcggggtagccatagggacttattggaggcaggggaactgggccaggtctgtgaaggaaggtcagcatttgaacagtggagggagggtgttgcggtgttgcagtgctgcagcaggaaatgcagcaaaagcaggagctgcaagaagttggttaacagaagagtgaacagacttccctggcttggaagccacaggaggagccatgagggaagagtgctcagaagaaagctctgttagtgccagcatgtcctgtgagtgcctgtcacaggacagggtcagcagtggttctcaacagggagcaggtttgatcctcaggtgacatatggcagtgtctagagacatttcttgggtatcacaacttgggatggggggaaggatgtgacaggtgtctggtgggtatgggccagggatgttgctaaacatcctgccatgtagaggatgggtcttctcacaaagaattatctgtccccaaacagcagtaacgcccaggttgagaaaccctggcgtagaggaaacagtgtgggttttgagatctgtagacgtatgtttgaggcccatgcgccctctttgttggaggagcctgatggtggtggttgcaggagaagtagagagaaccgtgtaggagactcctgcagtcatttggggagaggatggtggctgagatggtagtggtggagttcaggacatgtgctcatatttgggatatttctgaagatagagctgacggtatttattgattgaatgtgggctaaggggaagagaggaatcagatgagcctaaggcttttggcctgagcaactaggagagtagtggagccatttgctgggatgggaagtaggaagaggagcaggcttggatgaaatgggggtgtggaaaacacgagtcagtttcagacactctagatgtgagtgagatgcctgatattagatatctaagggaagaagaggttaggtaggcattggatattcttctggagttcacatgaatcagagccggggcatatattgggaagacatcagcttacagaaggcatttgaaggaatgagaatgcattaggtcaggtaggagtctcaactcattggatctgacacctcttttttattacaaatattttgtaacagtcccttttattaccctaaaatgaaacatatgattaataaaaactgcctacacataattttttaaaaatcaacaaatgcagccgggcgcggtggctcacgcctgtaatcccagcactttgggaggcaaggcgggcggatcacctgaggttgggagttcaagaccagcctgaccaacatggagaaaccccatctctactaaaaatataaaaaattagccgggtgtggtggtgcatgcctgtaatcagtcccagctactagggagcctgaggcaggagaatcgcttgaacctgggaggcggagcttgtggtgagccgagattataccattgcactccagcctgggcaacaggagcgaaacttcgtctcaaaaaaaaaataaaataaaatataaataaccatgccctataacataaaaggaaagtaattgatagtaaaacaaaatatgtttcaatatgtaagtttctgggcacaatagtgctggaagttgcagtgaagctgtcccttctgtgtggaccctctaggagtgtgatggccacagacacagactgacacagccgtgttgtgtcgcacctcgaaaaccactagtgccattgctgtagatgatgtggtttttccagaatggacacttttggtgccattttgagaccaattttgaccattttcagtctcccttcattgtacataggcgtcttattcttggaagtgttagttcacagcagaaccatggaaacactgcactgtgtttacatgtaaacagagttacattctaggttcagataattataagctaatctttcacctatatggatgtcaaagtcgtgcgggatgcagagcagtaattggctatgtggactgccccttctttatccctgcttactgaacgccaggagcatatccccaaaataccgccacaggtttccaaagctcctctgaagacaactgtagccccagagattcatttggacacagccagctccctgtttgccccggggaggggaaatagtaacaagagttccagagtgcagaatggaatgtaactgctcccttcagaaatgttggggtgggagatggagaatgtgtctgatcgtgaagcctaggaaggcttcgagaagaaggtggcgtttcaataggatgggaatgtctcaaaggaggatctgtggttgaggggggcacccagatgaagcagcaggtatcatcacataacactggacctgaggctcctccaggcacagacaggtctacccggcatgctccgggcactcatcagggttggctggattgacagggaggctgggagtggtttcatttggcaataccgtaaggcaggctctgcttccagggagtagtggttacagcctggtcttacagtgttccagccgttagagtgttggtttccttctccatttttaacccctaaagaccagaccagtcccctgaaaatcgcatgcctgctctctgtcagtcatcaaaccagacggagaacttaaagtacaccagctgtgcgtaaggccagtgtggtcttactggtccctatctttgtgccgctcgtagcctctcaggggacagacattactcaaatcacaccctgcacaagtgctatgaaagagaagtaggagagccgtgaaagcaacatgtatctcaggggactgattcaggggatggggtggggttccctgaagaagtgacctctgagctgaagataggtaggattgatgaaggactgaagggtgggtgcagtgttcgttcatttccttcagacaacgggaagaaagctggtgtgtttggggagctgaaaggcgcccagtggggccaggtcctggagagcctgtggctgagactgggaagaccagcagggccagatgaggccatgggagccgaaagaagggtgctggtctttatcagaaaagcactggaagctgctgaagggttttaagcagtggcctgacatgatcagtttgtgttttaaaaggtcactttggtggcagttcatggagaatagcttgaggtgacaagacagcagacacgacgtgggtctctgggactgcctgtgccgttgtgggcagcccctccagagccctgagtcacgcagccttcagaggcacccatggctacgagaagcacagtctctgcctgaggctccagagcggccctttttccccagcagcagaccttgggacctgtgagcgctgcatccaattaaccatgggaagggtcagcaccagccaccagccccttaggtgaggactctgcctggggctctgctgatggttccgaatcatggagctgcagagagctcctccagcctggagacgttcttggtgaaagctgtggtctaactccaccggctcttcctgcacattgtattcaagaggggtgcctgcccccgctgactcaggagctccggtgctgcagccgccacgaatggggaggtgggccctcgatgtggcctttttgtggaaggcggtgttgaccctggggctggtgcttctctactactgcttctccatcggcatcaccttctacaacaagtggctgacaaaggtaccaggaggccttgctggggcggggtgctgggatgaaggtggccagagccatggctacggtgcccttcatgtttaacaggaaggcacaagcttcaaccagtctaactggaagccagtcacggctgggctggaacagggccctccaagcctgccgtgccagggttccccttcagtgtttggatccagggaaaccaaggagagcggggggtgtgaagggatgagctggggaaactggggctcaagcagcagctatttaccccactagagaagtatttcaatattttaataagtgatacaacgtagtgggccgcagtggctctcacttgggcataggccgtgaggaaggctgggcaggtagctcacaggtgtgttgaaatggtggagacagcaccaggctaggattgagtctcttggctgccacctgtcttcgtgacctaagagtctgtcattccaagcgatgataccgtaactaagggccctacacacatagcaaggtcctcatgaaccaccgaatgagccccactccagcagaggggcgaagaggaagagggagccggtggggggcaggctgtctaaaccaagccggggtgtctgctttgggctccatacagagcttccatttccccctcttcatgacgatgctgcacctggccgtgatcttcctcttctccgccctgtccagggcgctggttcagtgctccagccacagggcccgtgtggtgctgagctgggccgactacctcagaagagtggctcccacaggtaggtgggggacctcagtgagggcagagcaggaagaggggctggggaaccataggatgagaacaagagagacacccgcatgtctggaagccaagtccctcccctcttcctgcactgttcctcctctgccctcttgacctggcctcccaccacccacgctgctgcctcttgtgcactgcgtgccttcccactgccccaccacacacccacaaaaccccccctgcacctgcggccccgcagctccctctcctgccagcagacaccgagcctggagtgcagccctcaggcctggagataagtggtgagcaggcagggtccctgccctcgcagggctgtgacacggacatggagggcactacggagcccagggaggggaccaacccaaggccggggcccatggctggtagaggaagatttcctaggccaggtgccaagtaggcagagccctgaaggatgcgtgggactggttggccctgggaggaggggccctcgtggcccgagggagatttagtgccagctgtggggtctggaagggaactcaaagtgtttcaggatactgagaacccggtgctggccagaggaagtgggaaaaatgagaactgagagggtgggcaggggtcatgtcctggaggccggattccccgtggaggagtttgtgttccatcctgagggaaaagggtttccagtaagggatcaaccagatcaggttaatacctccgctcagggggctcgccggagtgtttgtggaaaccataccggcccagccagttggaatgggccccagccctaatgctagagcagcccccgacctttgggggccagatattaaccctttagttgctggtggaaaagaaggcccaagggccccacaggaggcaccgggatggttcagaagtgggggacactcaggtgcctcagggtaccagcccaccccagcagagtgtggacctcccaagctgtcctgtgggtgcctgtgtcttcacagctctggcgacggcgcttgacgtgggcttgtccaactggagcttcctgtatgtcaccgtctcgctgtgagtactggccatgccctgctgcctcccttcaggctgaagctgtctgtctgtccagcggggtgtctgcacacccggctgctaggccagccactccaccactctgggaccagcccttgctctctcagcctctccctggcacccagcagctctccgggaagtcgccagcctcttccgtaagcccagcgcagaggagatgctgtgcccacctgccaggcagcgtggggaagccagggagctctcccagaaccccatcatcagagcaggggaaggcaggctgcaaggccacagacaggtggccactggtgggtggtacacgcagccgcagcagagccctatgtggcctgggggctacacaagagtttcttcttccctctgatgttttgcttcagagagcactgttcctgccttcttgtcctcctacttctcatccttccttcccgctcctgggctctgccgagggttaggtaaagaacaggactcagggagctcaacgtcagacctgtaacctcttctctctggtgataaccagaggcctcttagtcagagattccttctgattaaaggtcgcttatcactcagatgacagcccagctctgtttggtcatttcgctcagtgatttgtgctcctgctcctttctcggtgatgggtctgagccctgagctccagcagtgcattgtgggtaattttgcttccaggtacacaatgaccaaatcctcagctgtcctcttcatcttgatcttctctctgatcttcaagctggaggagctggtgaggccccagcgtctcttgtgtccttcctgcccccacagatgctaagaataaagtgggagtctgagcagtggcttgtcctgctgtgtgacagaggagacaagcccagtccaggtggcagtagatccctttctgagaagggacctagacatgggcaatactcagaatatttagaaaccagtgtggcagggtaatgaccaaaggtgaaagcactgcaggatgagggtcccagcagagctgggtctaggaagcaccctgctgtgggaggcagtagccctgtgtgttaggcccagggaggaggtgggaccacttgggggcctaggacagccgtcagtgtggcagagcaagcagggctgttggcataccagctgaccgtcagccctacatgctgacattggtgggcaaggactgtccaggaccccctgggatggagctgaagggtggaaggatttcttgccccaggggcagccaagatggctgctgaccccaggctccaaatgtgatgaacccttgaccctcaagacccccgagttagctgccactgctccccatcctaccagcgcgcggcactggtcctggtggtcctcctcatcgccgggggtctcttcatgttcacctacaagtccacacagttcaacgtggagggcttcgccttggtgctgggggcctcgttcatcggtggcattcgctggaccctcacccagatgctcctgcagaaggctgaactcggtgagcacgtgccactcatcctccagagagaggaaccccggcacaggcagggcggaggcagggcagggccggaccagacctgatggtgcctgtcccccgccctgcaggcctccagaatcccatcgacaccatgttccacctgcagccactcatgttcctggggctcttccctctctttgctgtatttgaaggtacgttgggccttccctctcaagggcacctcagtgcagcagaccacagatcctcgccctgagcccaacacagtggtagctgcagagattattgagatcaaagatgcagtccctcccctggaagcgcatggtttggggtccagcatgataaacgctacagagaaagcacatataaaattcagggaacagtaacagtaagtgtgcacagagccctgaaagtgcaccagggctgttctgatctttttaaacataggaactcatttcatccttccaaaaacctggtgtggcagtactattattatcccccattttgcaggtagaacaaaatgaggcccagagaagtaaagataacttgcccaaggtcccatagctcgtaaatgagccagaatttgaagccagcagcctggctccaagtggtccagccctactcttaaccaccctatcttgcctctaaggaatggggaatcagggattgttccaagatgctggagtaatcaggcaagtcagaaaggcttcccaggccgtggtttggagggtgagtgggattttggcaggctgcagggagcaaggcatctcggaagtaggaataggaggttcagccatgtccaggaatataacctggggatgtgtgttcaaggagtgtgggccacgcaggatcagcagagggtgggcttccagagctgggggctgaagaccaggagccagcacacaggagcctggggacatggtcagttgttcctccactgtcgtcctccagggatgaggagagccctggagaactgtgtaggctgggaggtgtgacgccaccttcctttctttgatgttttgggattagcctttgtcccctttctgtttatccttcctcccagagtcccgtctgtaatgccctcagggtcattacagaaaattctgtcccacatccatttaagtttcaagcagtgaagcgtcttgaacctccccaagaaaattattctgaagccccgttgtccaggaaacttctgttcagggcctcgttttttttccttctttaaaatctctccccactccttcattatgcccccttgtaccaaacgccacactctccctcccctcccgtgtgtttacaccatgccccatctctgcaaaacctcatctgaaagcccctggtagtcgtcacttggcaaagctgcatggatttagctcctttaatcttttctggtaaattaatcccccaagcgccttcattacttatgctgctcttccccgaattcccttcaatttgccgacgcctttgcagttctgctgagcccagcaccaaacaagatgtcctacactgtgaggctgttttgcctggggggactgtcactcggcatttctttggtgcttccctccaaaaatctcaaaatactcgtccagcttccagctaccacagttgtctcttgtgcccagttctgggccccccttcaccctgtgctaatacaccacgaggactttcgtgtgggagggacgccgggagtcattcttccagatggacagtgttggagggaccatgactcctccgaaagtctaagctgaatttggggtagggggtgtgcatgcctgtgtttctggagcaaggggccatgtgtttgcattttctttttgggaaatgttcatcaagtgataccacgggttggagaaataccagtctggtcccaggcctctcattttatcagtaaggaaactgaggtccagaaaggggacacatctcagcccaagtcccacagctctgtactagcaagacctagattaaaatgaacgtttgtagggatagaattttgtccctgtttgtaggtgaactggctgaaatgtagaccaaggagttccctgagtgggctggggcactgttggtccttcgtcacttggtagccgccctaccttctttagcccagtagttaccacagctccaaagaccccatgaagtcagcagccatgagcccctccccacagaccagtaagggaatactgtccaaaggtgcagggcacttccatccgtctttccatgcagggccacccccctctacttcaccccagaggctcagacgagccctccccatcattccgctaggatccccatcatcccactaggatctccatcatcccgctaggatctccttcatcccactgggatctccttcatcccgctaggatcccatcatcatcccactaggatccccatcattccactaggatcccatcgtcatcccgctaggatcccatcgtcatcccgctaggatcccatcgtcatcccgctaggatcccatcatcatcccgctaggatcccatcatcccgctaggatccccatcatcccgctaggatcccatcatcctgctaggatccccatcatcccgctagggtcccatcatcccgctaggatccgcatcatcctgctaggatctggcttgtattgcccccaggcgctctggcagccatcactgcttccctggtttccccaggtctcaggccatctgtgtgggatcactttataccttccatgctttttctctgggctgcagacagttagcaggtctcagtaagaactcactactacagtggaagatcttgtgtggttggcattgggctggccaaggcagcccaggacccggcctcccactctctctccctgttgctttcaggtctccatttgtccacatctgagaaaatcttccgtttccaggacacagggctgctcctgcgggtacttgggagcctcttccttggcgggattctcgcctttggtttgggcttctctgagttcctcctggtctccagaacctccagcctcactctctccattgccggcatttttaaggtacagactcgggcgtgatgccagtcctgtcttagagagggagcccccaggggtttctcaccagcagcttcagtcccagctcctgcaccccagggccctgcagagaagagaaggaagtgccccattaggtgccaggcactttgctgagtgctgtgctggcccctccttctgccttgaccacagccctgtgagagggtatgatcactcccatcccacagacagggacacagatggagagccgcccctccccaagggcacagcaggggcctcaaagccagctctgactctgctaggcctggaatgcattcacattttaccttgactgccaactctggcactgggcagtggcctggagccacaggttgaacagcccctatccagactcatcaggaaagagttccgtgattgactggcggtgtcctccaaggccatggccagggctagtgagaccctgagaaagcacccctgtggccagccttgctgtacctctgcctcgcaggcctgtccttccctctcatacctcttctcacttctccttctccctcccacacatttcaacagtcctccctgttcaggggcagggagggacttttctctttggccaggcacacaccagtgttgaagcagtgttgcctaaacccagaaatgcaggcctgtccaagggtcttctggtggccagccgcatgctgaggcatggctgtggttcttggatgaacggccttgccagtcctgtttggagtctctgtttatagagagccccgggaccagttgtgtcttcagtccggggtaacacagcattctcacacataggctcagggctctcttctgtggctgccttctggggcagccgtcctttatccttgtggataaggcgcgatctggacaccctggtccccagcctgggatctggtttgcctcttttattcctgacagaattccatgacaagcacctcctttgttgcatctcacaaaaggaggctggcgggacagcgccgcaagccggccgggtcccctgacctctctgcctgcctgggcccaggatttcagtaagatcttgatctgcccacctgagtgtacctagtgcccccaccttccaccctcctggtcaagcagccaaatctgcctgttgatcatgctccctcctgcttctctgcccccaggaagtctgcactttgctgttggcagctcatctgctgggcgatcagatcagcctcctgaactggctgggcttcgccctctgcctctcgggaatatccctccacgttgccctcaaagccctgcattccagaggtaacccagagtcccttccagaagcctctgttttctgttcttctccctgtgactcttagtgattctgatgcaggaagtgtgcccggtggctctgctgccgtcactcctctaggaagatgtgggggtcatctccagagtgggtgggtggggcctgggtgactcagcacacatgcaaatcagagcaaaccaagaaaaccacgactgggcctgtaactgtggtctctctctatcccaaggtgatggtggccccaaggccttgaaggggctgggctccagccccgacctggagctgctgctccggagcagccagcgggaggaaggtgacaatgaggaggaggagtactttgtggcccaggggcagcagtgaccagccagggcaaatggcttagaagcaggccactccccagcctgctgccagcactcactgtgctcaagccgccagggctcatcatggtagctgggagctgtggacgggagtcaccaggtggtggggccaagccagggactcatgacttttgcccctcccttcagagcctggtcacacaaggggcgagcaccaggccagcctgggactggccagagctgggcccaagctgcgctggaatcgcagcaggagaggggagtgggctggttcttcccaccacttcccaggctctgacagccgagactcatttccaaggcacagcagctttctaaagggactgagtttggactgggttttggacctccaggggctggagcttcatcacctgggcagtgtcttttctcagagagcaggtttctttatagtttggaaataaatggttcacggtccactggccgccttgtgttgctggagacgtgggggcagggaggggacagtgtgggcctggcctctcctttcctttccctgcctggagccttcttcaaatgtctggtcttaagccaggcctccttcattttctcgctcctgttagaacaccagtcccctccccagtggggccccactgcacctgctggcaggaaataaatgaatgtttactgagtactgcattctggagaccttacatgttttcacagcctagtttgaatactggctttgtcactagctgtgtgaccctaagcaaatgacctaacctgtctgtgccgtagttttttaatctgtgaaatggggataatgtctatctcagagtccttttgaagattgagtcattattagtaacagattaaatgttatataagca

SEQ ID NO: 1024 - DNA, 32681 bp, Homo sapiens
aatccgtctgaacttcagttgccttacctgtaaggtaggaatgtttttcagagttcttatgagcatcaactataataatgatatagaagtgagcaatcaactataaagaggctacctgggctgggcacagtggctcacgcctgtaatcccagcactttgagaggccgaggcagatggatcacctgaggtcaggagttcaagaccagcctggccaacatggtgaaaccccgtctctactaaaaatacaaaaattagctgggcgtggtggtgagtatctgtaattccagctactcaggaagctgaggcaggagaatcgcttgaacccaggagacagaggttgaagtgagctgaaatcatgccattgcacttcagcctaggcgacaagagcaagactccatcttttaaaaaaaatttaaaaaaataaaaataaagaggctacctgtacgttactactagatatatgattactatgaagttaccatataaccgatctgtttcaaacaaatcagacttatctagtgggtaagagcaaacccatgggttttgctctcattaattcagccattgttaattaagtgcttacccagtaccatcatcatatgctagtgatgctgctgtctgctcagacctccgttttagagttcctgcagagcttgggggcagctgtggtcttaggcgtattagttgcaatgagtagaaacatagactagcttaatttataggagttttattggcaggatacagtggactttcaggtaccccgagcataggaagtaatagccacataatctggaaagttagcaggtaatggcttttccatctctttctgatttctggcctcagttcatttagatatttatggattcctcctgcagaatcacttcctctgaaaggctcttggttttttattctccatatctttggctcgtacggatctttggcttgccatggtattcgctctgaagcttactatgatcttacttctccagggtcattatcacccagttcccttagtctgtgtcttttatttgtttgtatgtatgtatgtgtgtatttatttatgatggagtctcattccgtcgcccaggctggagcgtaatggtgcaatctgtgctcactgaaacctccgcctcctgggttcaagctgtcctccctgcctcagtctcccgagtagttgggattacaggcgcccaccatcatgcctggctactttttgtatttttactagagacggggttttgccatgttggccagggtggtctcaaactcctgacctcaggcgatccacccaccttggcctcccaaagtgctgcgattatagacatgagccaccacgcccagccagtctctgtcttttaaattcaagagaaagaactggaatagttcagctaaagttgggtattcactttagtcccatcagctatggcagggttgtggagagtgtcattcagttcagagaggctgcctgggctttgtgggaaggacagagtcactgagaatgggggcttattaatatctttcaaatagtttggtggttgcaaatctccatgctttaaaatgtatacgaatttttgaacagccgagaatcattcagggctaactttaataaagagagagtcaatctaggatatgtcatatggggtcaagagaaaataatagctataacctaatgagctttagcttaatctccaaagacggcgttcagaaaggagttaaaaatcatggggtttgtttcttagcagcaccatcgaaattaaggaagggtgtaacttcatttggtaaggactttaaaatgggcatcctcacttggattttttaaattccacttaagaatcatggacttttagacttagaaggcacctgagacatgctttagttctacactcacatctttcaatagaagaaaactgagatttggttaaagggccatgtatacattgtgaaagacctaggattgggtcctgaggcctttggttctaaatccagtcacttgtttcagcagggacaattatcccagcccagtgttctttctgttgtaccttctgtgcctgcttattttaaaaataagaagaagccaaactaaacaaatgatctaaaaagtcatatcgtatagttccatttatatgaagtacaaaaccaggcaaaactcatggatgatgataagtcagaaattcccctttaaaggactggaaggattgacgggaagaggaagtatgaagtaattttctagggtgatgaaaatgttcagtgtctcgttttgagtgctggttacagggagatgcatgtgtatatttatatgatgtatatttatatatacaaacatatgtacccttaagccctctgcattttattgtatgtaaattatatctcagtttttaaaattgacctcacaaccgtgcagtcctgtctactaattgcagcagctttgccgataaggataaggatgcatctctaagcatccagagattgatggcgccacccctagaacaagaactccctgtcttgctgtaactggagcagagcattttccccagaaattatgcagatagggccagtttcttttctgaggtttgtcgtgtgtctaggcacataaaaattacatgtgaaaaattctgccatgagctgcagaagttatggaagccttgggggccataaggccaacccacttcaatccctttaggctgcgtttaattgcagtggacagaagttgaggctggctcaaaggaaaaggggaaagcattggccgaagccagtccaagttctgtcaaccgttatgacttactagctgggtgaccttgggcacttaacaaaacactgagctttagttgtgccatcttcaaatggaggtgataatcctgttctgcctaattcgtggggctgctgggaggacacaataaaataagtgaaagcacttggaaaactagttcctttacattgtcatgttctggaaatgctggctttttatgacagtagacttctgaagcatcccattctgactaggaaatggtcatgaaagcatccctctttctgaggccgatgggcttgtgggggacaggacttttactccttttcatctaagaggtttatacttaccaggctgtgagaactgacatctgtgtttgggctgaaaaattgatagcatacatgcataatagcctcgcgacagctatgctttgtacgccaggagaggcaggtggtccccattagcgaggcatgaattgtgggtgaatggctaaacctggaggatgcagaaaggtctttttcattaagagaggggcctctcctgaacttgtaggcaaggagtgtaaatatacattgaaataatccatcagccaagtgacttcccttcgtcagaccttggagagagaatgctttagttactgcttggaataccagtaagctatcagagttgcctaggataccagtcacatgggcccatcttccagacttgctcaggatgatttattttcctttattttggagagaagtgggggagggggtcagaggtacttgcaaagccttgtccttataagaggggcccttgtgtgaggatatccttacctctctccacttgagttgtcagccgcccttgcccttggcagtagggacgaaaatagcatttcctgtcccagttatcttccccattttctgatgtcgtcccacacagaggaggctttgcattgtgtcctttgaggggaaaggggtggcatcgatgagtggggaggaagcaagagagcatgtagctgggccctgctgatgctgggatcttcctaggatgactgcagaaagaagtagcctggctcctccagctaaccactcaaccaagaaaaggctgtctattcttatctgtctcggagcatatgcttctctcctcccaaggtctcaagacaggaatttgcagtaaatacattcctctaccactgagtcttcttgactcttaaactgaagtgccacattggcatatcttgctactggctgatctatggatgatagatagtttgtcccatttcttcttgctgatttaatctcaagagacaaaatcctaagcagaagttgtggtatgatctagaaaaattcaaaccaggtagtttcatgtgttactttatgcagtgtctgtcttcaaactcttcaaaacatgtaacaagagtgaaaaatgaagaaatactctttttccacctttctgattctttctccccaggcagccgtgtctgtgtttttgtctcgcagaattagagcccattgggaacgatgccaccaccgtcagacattgtcaaagtggccattgagtggccaggtgctaacgcccagctccttgaaatcgaccaggtatgctcctgaagtgagaagcagtggttcaaggaaaggcacctggggagtgcatggcagaggacatcttgagggatggggaccaccggcatcaagagtaagaacgagcaacaggaaggctaagctttgggcctggcccaccctagggaaggtcggtcaccatggcttgggagaggcttcctcttcaacaaaagctgttaggaaagaagttcattctcatgccccagcttgaccctgcttggcaggcctcttgtcagaaccttggcatgagtaggatgttgctgctgttgaaggctttctctctctctctttcagaaacggcccctggcatccattatcaaggaagtttgtgatgggtaggttgaaatggacctcgttttcaacagtggcagctccgactgaaagagcactcctacaccttgaggggagttctgggaaggatctccagttaggcaggtcctcagcatgggggtcttgggaatcattgtcttgggaaggaagtacagttgacaaccatacccctaagacgtttatacttcttaattttttccttaaagtctagcattgccctattgaggtaggatctgagacccctcctcagttctgcacacctcctattgtggtgctcatctttacaaaaggctgaggccatgattttttcaacatgacaacctaaagctttgtttccactgtattccaaataggccacccaatcccttgagcaactcttttgaaaattacttatgagcagcttctgaacaagagagtggccaagtgggatatactgtttttctcttgcataggtggtcgttgccaaacccagagtattataccctccgttatgcagatggtcctcagctgtacatcaccgaacaggttagtacagggagaggcaaaatcaatatgggccttgcttggaattaaacgacccaaggagacggcactatttatcttcactcagcatccaggtagcttccatgtgttgggtaaagagtcactctccggacagactgggaaacaccagcccttgttcttccctagtggctagaaaaaggtggcttttacttcctgagtgcccagggtgctagaggaggatcttagaaattctttgccaaggaataagcaggagaagagggcccgactgaagatcctcagttacatctactgtaaaaaagacaaaacattattgttgattcaacttgcttgtaccactttaacattttatcttagttactttttttgtttatttttcactacccagactcgcagtgacattaagaatgggacaatcttacaactggctatctccccggtaggtattctttcttccttaggagtttattcatgtcacaaacaaatatgagcacctaccatgggccagactctgttctagaaataagtactctggagataagaaagtcagtctttttgtatcaggaaatagtacaggaaaataagtctgtcttggttctcaccacctagtggggagtaaacaaatgcaatagaaggcctgtctcaagggtcttgagagaaagttgcttagggagctgtgggaactcacaaaggggaccacctaactcagcctggagatttccagaaagtcttgccagagaaggcgtcacttagctcagatgttaaaggatgagcaagaattagctagagaaataagaaaaggaaaagtattccagtcagagaaatcagcatatgccaaggcacagaggtatgctgtgtttgggaaaagcaggagtgctgggtggctggaggcttgtagcagtcattgagaagccagatattcaaggttccttgatggcctactcgtaggtttcaactctgtccagaaggaaactggggacattgaagaattttaagcaggaagatatgttatgtttagattttaagttttagaaagatcactttagtgaccatgtggaagatgggccttaagaagaaggttggtggtagtaggaacctttgaagaggctaataaggaatgttaacagcccagtgaaggcaagtggtaatggagatgaaaggatggatatgaagagtatctaggaggtaagctttatgagtatggtgatatgctagatgtggaaggaaaggggagaatggaggatgaccctgatttgtgcaagagcagcccttaaaggtcactaaggaagcaaccagaagggtagaaagaacaccaagaaggtgaagtgactgaggagctttgggcagggagagtgtcaggactgaggagagtatggtctgcaatttttaataagcagagagatttagtaaactgagagcagaaaagctgtctaatgacttgggaggttagaggacactggtgatactcacaaaaaagttatggtggggaggccaggtggccacactgaagtggtcaagtaaaagaaaggtaaaacagtgaggactttgagtctactgctgtatcaagaagcttggttttaaaagaaaacacagagaaggtgataatgcgaaggggacgtggagtcaaaaagatgtgctttttaaaagcaggtaaagcattcatgtgtttcacaaatcaaaaattttcacagagatgtagcaaaaggtctccccgcaactcctgtccccatctgcccagttccccacctttctgacccttcgtgttggttgtttctgttgcaattttttatgtgcccttaagaatgtgttcagatggaagagaggaaggttgaaggtgcaggaaagcaggtaatcaatagaacaggaccttactggaccaggagaggaaggactcaaagcccaggtagagggaatcactttgactgctaggcccatgaagaagacagccaatatggttgcacctttggttacatttgtagaagggcagccagaaaattaagggcatgatggcacttcttttcttggtgcagagagagactggttcatctgagaggaggggaggtatgaagtgatatcagccagcgtttactgaatgcctatattttgctaaatactttgtgtaattaaatcatctaatctttacagacatcccatgagataggtactcttgatagccccattctgtaggcaaggaaactgagggttagagaggttaaattacttgccacttgtcacacagctaataaagtagccaagcccgctctcagacccaggtctgtctgactctaggcccatattcctcccatcatgttcttctgcctccccctcttctcctgaactcttctcatcttaaggacttcattcttccctcctaagctctggtaatttaatatgacagtctgggagttactcacttttatggaagtgccgacacatttcacagacctcttgcacagtgtagttgactttcccagaagcacatctctctggagcgggaggcagcagcccagaaatgctgtctcaggaggaaaattgacatttggagttggaggtttctaagtgggatgcagaccagtgctcttcagattgttctatgctatgaccttttcccgtggcgcacattttctccactgtagagatagcgagggcttctgtattgcagagagcactgtgctttgaagggccagctttgtaatagtaaaagaggagaggcaaaggggagagggccagcaggcctgactccttggcggcagcaggaattgggctccagtcacttgcttaacactgagaaaaaggaaagaagacaggtgtgtttttgttcttaagtctcttgctttctagtggagaacattaaattaacacccaaaaaacagagaatgatgaaacaataaattgtgaggcactatgtagtaatgagctcagcggaaggaaagcccagtgaatactagaggagggattttagccgcagcttgcagaaaaggaggcaggcatcctgctaggaaaagttcatgtgctaggaggaggttttgtcttcaccagccttcattttcaaaaaacaattgggaaattgtttctggctccttgatgttcttaaagtttccccagaactgtcactttgaggaacaatcatatggattctaagagaaagtttttaaaaaattgccaggcttttcacattttaggattaaaagggaccttagaggacatcagattaaattcttcacccaatgcaagaatcccttctacagcgtctttgacaggtggttgtccagattctccttgattgcttctgctgacagggagcttaatacctcaagagaaacctcttctgctgtctaacagttttataaattttattttattttattttattttttttgagatggagtctcactctgttgcccaggctggagtgcagtggcatgatcttggctcactgcagcctccacctcctgggttcaagcaattttcctgcctcagcctcctgagtagctgggattacaggcgcatgccaccatgcccagctaatttttgtgtttttagtagagacggggtttcatcatgttggtcaggttggtctcgaactcctgacctcgtgatctgcccgccttggcctcccaaagtgctgggattacaggtgtaagccactgtacctgaccaattttattttcttttttatttttgagagagagtcttgctctgttacccgggctgcagtgcagtggtgcagtcctagctcactgcaaccttgaattcctgggctcaagcagtcttcccacctcagcctcctgagtagctaggactacaggtgtgcaccaccacacctggctcattttaaaaaattttttgggagtcagggtgtcactctgttggccaggctggtgtctaactcctggcttcaagcaatcctgccttggcctttcaaagccttgggattacatgcatgagccacgcacccagcaagacagcttaaatagaaaaccttcctctattaaaccagtatctgtttctctgtgacttaccatcgttagtgggcctcccagatgcctccagtattcccttggtaggaattttttaaatccataggccaaagcggtacagaaaagatgcagataactacagattggttttggcatactaataactccctgattgattccacaaacatttatttagcaactcctaagctgtgtgaaaaaactagttctgcctcaggtttggatgtccacagaagggcctctgtgagctatccacagagtagtaacctgctccaaggagcagatggcacatatcttgtccctggcctcctagtcccgggctgcacgccagctgatggagaggacccagtcatccaacatggagacccggctggatgccatgaaggagctggccaagctctctgccgacgtgactttcgctactgagttcatcaacatggatggcatcattgtgctgacaaggctcgtggaaagtggaaccaagctcttgtcccagtgagtatgactaaggtctcgttccaaggacttcgacgatttactacatcccacagggcatcctagtctcatttcccttgagtcaaataaggagtttattgaataccacctgtgtgcagagcagtgtgccaagcactagagtccataccaagatatataattccatattgtgattctaaatcgtgtagtctatttgggctctcacaaattaaataacagtacaaaacagtactgtgccaagtgagcagtgaaaataggggctagagaagtcaggaggagagcagtcacgtcgtgacagacctgttaattgctggaaatgtttggtttgatgagggttagtgagcagatggtccagtatctcccaggtgtctgtttgtaatcatcccctgctcctccctcttcagtcacctcccagcccatacacacacacacacacacacacacacgccttcctttgtgtttaccacaggtgtcaacctacccattcaccatctccctgccacacttttgcacagggaggaggagaccagaactttgtgatacccacaagcatcttcatcataccccagagttcacatgcatgcggtgggcagctgtgccttgtgagcagcagtcagtaaacaggtgcttggagcctaacctgccaaagagggagtcagaaatcttctcagcccatagatcaactattgaaattgttagccaaatcgagtaactaatcatagatatttgttttacatattggatcttccagctgtattgaagtcctgaagccttcagctgccatcagcactgacatagttctacagtctcccaagggtacagggttagactggccttagtttcactctcttcagcctgaggataataatagctaccttgcagtattattgtgagaagtattgttaatgagaatgtgtctgaacatgctttgtaaataggaatatcatctgttaattctagagcactgtacagatgtataaaggattaaatgtataaggagaagagaaaaaagagaaaacattttaatccttattctctaccagcactagaataagagctttgcatacatcatcatcttgtcgtctccacaaccctgtgaggttaacgctgtgagactaacttgattttacagaggaagaaattgaattttgaaaagataaaatttgcttggttagtaaggtggacaggaactgaacccatctcttgcactctactgcctcttggcccaaaggttaacatggcacttacacttccttaggttctcccaacaggtgttggagtttgacaaaggtccaatgtcttctttggtcttgggaaatagataagtgattctgtgtccctgggatgaagcatatggagaaggaagatctaattacccagcaacatttttttttttttttttttttgcagcgatagatacctgggctgaatctgctctacactggctaggtgtgcacacaggcacttacagttacagttgcatcgactgatttcccatggggtgttcacattaaaattcatcttttttgtggctgccctcacacctgtgtttcccgatctgaatctttgtctattttgtgtgtgtgttgcacgtgtctcagctacagtgagatgctggcattcaccctgactgccttcctagagctcatggaccatggcattgtctcctgggacatggtttcaatcacctttattaagcaggtgaggcctccaacattctgtctttctctcctccctcagctgccagttcacaaggcttaaggggagatacaggcaatatcgccattctggtgagatcagctttatattccctggggccagatttttcatcctcaagctctagtcttctgtggcttctgaaagatttgcattttgttatattctcagggcctgcactgagatggaactggaccgtcagaactaaatatgatcaaagtagaattagattgtcagtgagactggggataaagccagccagtcaaccagtactagccctgagtcttttgaccgacttcctgagctctctcttctttttgtatatatataaaaaaaatttgcatttcatttgtaaatttgccttctatttacaaatctgcaaggtagcctgtttggattgtcagactaagttcagtgggtaggagagggtacttctggttttaccctcctttcttttacacaaaggagcagtgtcaattcagaatactgaactaaaaccaatgaataatattgtatctgctgccctagaacttcagctatcattggcttaggacattgggactccccgacactggacacaagtgaaatgaccatgtgtcaaggatattataatggggactgagaagaaggattagagtaaaaggcttcaaggtcctttctacctctcaaagtctaagtgtgtttagggggagtgtgtgtcaggggaggtacatggagataaaatgagatcccagtatcagtaaaatcctctgcttttttataccccactttctcaaactggaacccttattttgataaaaagaattaagcttttagattttgaggaaacacaattaagtggatactataatctgagattaaggtatccatgccaagggaatccctggcacattggccagggtagccgtaaaccagataccactatccacctagcaacagctgcccaaatgtgaagcagagagagcttcaagggctagcatcagatgctaagcttctatctttcttgggccctgagcttctcaattgatgtgccatctctgggtctagattgcagggtatgtgagccagcccatggtggacgtgtcaatccttcagaggtccctggccatcctggagagcatggtcttgaacagccagagtctgtaccagaagatagccgaggaaatcaccgtgggacagctcatctcacacctccaggtgtgagtaaaaaaccctacacctccctcccttcacttgtctgtcctcttttctcctcttattttaagtcttccaatcctactctcctttgcttatattccaagctgttggttggcttcttcattcatcacctcttccacactcctgccagaatttctcccatcattcagacttgatcatgtcatgctcctgcccaaaatcctctgtaactctctctgccccttaggttaaaatgaagattttcccagtcttcccataccagggtggtaccaggcaaaattagatgctttctcacatgggcccagtagtctctgtacctatgataattatataaaatactggatttttattatctgttgcccattttgaacatagagcccccttgaaacagagaccaatcattgttgtatcccctgttttgatttaagtagaggctcaattagtgcttgttgaatgaatgctcactgaaccgacgatgcactgtgggtgatttgtaagaaatatcacacaggtgtgagtttggaatatcagttcaaatccaggctcttctgcatactaggtctctgccatcagcaagtaacctagtctcttctggcctcagtttcttcatctctagaataggttaatcaccttcacctctcacactgtgaggatcaaaggagattttaaaaaggtccagcatagaggccaacctgggttaggtattcagtaaattcaggggcttttttcctttgtttgtttgttaagactcttatcacatcctaaaacattttaccagatactgagaccatatgacaaatgaacccattggagcaatgtttctcccgtctccgctgtttttacctcacttccaaccaacctacaccatgtaaggaagctggactttgcaaaacagtggtggcactcctgttgattctcttctgactgttgttcacttctgttttttagacattgtcagaatgttgccagaatcccccaccagttcgaggggaagtcatagctcccagatttgggagtttatagtggccctgtcttcactcagctatgctcccaacttgtttttccccactaatccaagtaaaaagaaagcacaattatttctttgcaactctgatttctccttgtcacttttaaggaattttcagcctcagctttctttgcttttcttttttgagacagggtctcactctgccgtccaagctggagcgcagtggcatgatcataactcactgcaggctcaagcgatcctccccatctcagcctcccgagtagctggaatcacaggcacactccacaacacctggctagttttttttttttttttatttttgtagagacagggtctcgctgtgttgtccaggctggtctcaaactgttgggctcaagcagtcctcccaccccagcctcctgagtagctgggactacaggtgtgagtcaccatgcctggtctagcctcagctttcatacccagcgagccaccaaggttgattaaggtgagagggacattataaactccagatagagaattctgattttcctgtaacctcacatctacttctctggtttttttttttgtctctgaattcagagtggccccagttgcctccctagggatgataggggaacatggcatttcataggagccaatactttcagcccacagctgtcaccagaacttatatgctttcctttttgggctgagggatacttagtgccctctgttagactccctgggtaccatgtgactaaccaggaagcccatcagaccctctggaaagacagccacagaatgcacccaagacatggcaggtggagatgtcaagtaccaggattgtaagattccagagaatgattgtagttattttgtttgttcataataaaataagtttatagtcaaagactttaaaaatacagaaaaacgcaaaattatttgcccattatctcacctccagacatacccactgttaaacattaaattgaatgtcccttcagtatttttatgcatatttttaacaaaatcgggatctcattatatatactatgtgtaccttgattttttttaactgaataatacaccttgaacatttctccatgtcaaagatttttctaaaagggtagttctaagtcttttttgcaacctagacacctttgaaaatctggtaacaagtatatactctcaccagtttggaaaaaataccacttagttggcaaactacatagaataatttctgtatcattcctggggttcacaaatactctaagctcatccctgaatcccaggttaagaatctttaccctaaaacatgacttttaataactacttaagattctcatatgtataaatgttggctaatgtgaccatttggattactttccattcttttttaagtagtactttaatgaaacgccttgtcagtaaatcttgcatagctctctgattactgtcttaggataaattcctattagtgaaattgctgggtcaagagcatgcccactttgaatgcttttgagactgagctccagatcattatttgcttataatctgtgagtgattgttttaaaccatttctaagcatcatcttgctgttcagtcttctaatctccctctctcttctttctccattgacacagctccaaccaggagattcagacctacgccattgcactgattaatgcactttttctgaaggctcctgaggacaaacgacaggtctgtggctgccttttcacatttttcatctgggctcttctgagataattctcaccccatgcactctttgctatgcagagagcacaaatccagcaattttcccaagagttcttcctcttagctgtctggtctggagcccaggagggtggctttgctaaggaagacccagggaagacctatgaggggaaaccagctgggtcttagatgagagcagggcccttcaaactttttcctctaaagggccagagaataaatatgtttgactttatgggccatatggtctatgtgatagctactcaaccttgccattgtagccaaaagcagcctcggccagtaggtaaatgaatgggtatggctgtcttccaataaaatcttatttacaaaaacaggcaacaggcctaatatggccatagtttgccaactcctgggttacagaatcaagaataaggaagaggagaccctgtggctaccctgagtccaaggagtccaatatgaatgggatttcacactaaatcttaggtttaaaggttctctgatggagattctaaacatcttccttcccctgttcattaactgtgacattatgcagatagctctgcctctgtgaaccttagtttcctcacctgtcacatgggagcaacaacatctgccttgtttacctcacaaggatgtctgaggaaaaacaagatccctgtttcacaaataaggaaactaagaatcagctgggtggtggaacaaacactgacctaagagccgaggggcctgggactaagtattctccctgctgctggctggacaagtgtttgtaacctctttttgggtctcagtttctctttctgtaaaatgaaagggccagtttaaatgatctctgacagcccttccaatactaacattctagatttctctgagaaaagcccaagtggtgttaaaagtaagacattttagttctctgacaatctcatgggctcagtaagatgaaattcaagtgggatcatgtatgtacccagctcttggtagattctagagggaagaccagaagcatctgtggttctgtctgtccttgtctttcttggatggcttggctctgttaatctgccttcccggtccttgtttgaatgtaagctgaaagctcattccgtctgcttctctctgtgcttttgctttctgccggcaggacaagcaccttaatcctctagacctgcctgtcactgtaagtagcactgccatgtggaaagggccccagctcttgcaggtggggaagtcaaagctaggcaagaatctcatggtctgatctagatgttcagggcatgccaagacccagggaaaggttgtgtgctgtgaatctcctttgtcaggacacttagggaagtactgcagattagagtcacagaaaggattaagggggtacctgccccagggagtgtggccccagccttcctttataacttgcctttgcatgggtctgtagttcaactagggcagaccagactcagaaacagctcgtaactttgatctagacaataccatggatgcgtcaccttcttacttgctttagtggaagagaaaaggtatccgtgccctttttggactcttactagaccgtgggaatccgaaaaggtttagacaatcgacaaaagggaatttggatgctcatttcttcattatagggagctttagagaggtcagctttgcgaggagatgaaaggggataagtgcctccccctgacaccacagagaagcttttggtctaagacctttatattctagctgcagaccactgtcaattacccaccttatgagttgtccacagcaagatttaatctcagtcgacctcctatagttaccagagaagtttctaggccactgtcctcctctgctagccagtatgtattcagagaatgcaaagtaaaatttaatgttcctggcagcattagccatttggaatatggctagaaatccagaagtgtgacagaggggcctttcagctctgagaaaaatgacacagagctcacagatactactccataggagaggtgtgacagctccctcaggcccactgatttaggattctctataaaattaaatgaaggcagcagtttagaaaatgaagtcatggtaattaacatcagtaagaagtgatggtcgacactggaaggaggagacaagaattatgaaaagctgtcagaaaaattaaaggcattgtaatctgggaccattttgtttatgggaaaatagcttcacatctcagtagctcctcagggtatcacagtgtcacaacacagaataatcactgatgttctttttgatgaagccgactccttagcagtgattaaattatcactgtagtcacttcagaaataaatgtatataatatgtctttaaaagatttgcataagaatggtcaaaataatgattctgagagaacccttaaagctttgctccctggaagattcatttatgtaggaaacttgatttcctgggtgggctaaataaataaagcataactatcaaagtctggatcaaatattataaaaaaggtgagcctgttataaaaaattacccaaaacaccagactcattgttctctaagccagttagaacggaatcctagactacttactgttgtagagcgtccagaccccagccgtctgctgtagggtgggagggggttgctggaccaaagcccttccttgtttggagtcagtgcttcactagagttccttctagccttagcagtggggtctacctggcacgatgcatgtggcttagaaaccatcacactgctctgtgtccatgtgcaatgtccttgtgacacaagcgtctcatcttcaagcagtcctcatctctctttgaagacagtggagttgattgtgccattaggaaaggaaatcctatttgaattaatttgcactcacaaaaatagggaatgttgcagagtgtaaaatacatctgatggtcagtggattttcgttcattcacccacttttcatttgggaggaaaaaaatttaagaaagcaaaaaaggcccagaattttgacatcaccttcctctcgatagtagtcacaggtgtgtgcctgccaccctgccttatatttgcttattttcctccacaggatatggcaaatgcatttgcacagaagcatctccggtctataatcctgaatgtgagttcctggaacatgctgtattttattactattaacaacaattattactgttattgttaatatattattattgaaattattaatgagtgaggaggacacacagaggaaccttatcaataggtaaatacctcttgaactgaatagctttttcccgcgatcctctgtgagcagagttgcctctaggcagccatctcaccagcaattgcagtgcgtccagggagggaccaaggccagctctactgtttgttgccctgcaactccagaatttttatccagagggaatatgttaaaataggcacaaagggggaaaataactcatccaactgacactgattaaaaatctgaattgtgtagggcactgacagaactaagtaagcaagtgtatttgctctcaaagaccttctggcctggtaggaaagactagtgatcatagtggggtgtgatctgggtttgtggtctaggaaaggatggaggaggaacagtgatttctgccttgaagaagagtgtttccggaaacttttagaggaatgtcttcaggtgacccttagaggatgagtaggcagaccgggaataacaggaatttcagtcagagggcagccagaacccagaaggagtgtgtgattaggcacagagcaaggagcaagtagatgaggaggctagagaggtagcgaggaccagatcaggaaaggttagtctcattcctaaggacagctgagggcatttaattgagcttgtgaagtaaccagatttgcattttagaaagagcacatgaaagacatgtgtttgctaaggggtacctgagggaggagagcagagcaggagctggcagggggatctggaaagaggtataaatccctgttaccacctgtggggtggagtagggctgatgttgggaggtggggccggtgggagtggaggaggagagccaaggatctgaattaaaaggaggcaactttggccggacgtggtggctcacacctgtaatcccagcattttgggaggctgaggcgggtggattgcctgaggtcaggagttcgagaccagcctgaccgacatggtgaaaccttgtctttactaaaaatacaaaaattagccgggcgtggtgataggcgcctgtaatcccagctactcaggaggctgaggcaggagaattgcttgaaacccgggaggtggaggttgcagtgagccgagaccaggccattgcgctctagcctggacaacaagagcgaaactctgtctcaaaaaaaaaggaggcaactttatcaactgtcagaaacaagggaaacctgggagaccacagtgaagggaataaaatgaaaaattagaagtcaagtttaagacttaagctaaacatggactttggagtctgccattttccaatctttgatcttgagcatttcacataacttctctggacttcagtttgctcatctggatatgaggactaagtgagctaatataatactgtgcttagcagggtgtctggcactcagtaagcactttgctcgtattggcagaacaggatgcagaggtgataggattgaagaagtaagctctgagcacttgtgaagctgagcagtcagctgctctaaaatgcagagtctgccagacttcaccttgcagaaccagcttctccctgctggctgcttccctggtcacacccagctaccagcctggcaggaggggccccaagcccacaagtgacaggagtacacaggttcccacacattcctgcctacactcctgagcagctgtcctggtcaccctcttctgcatgtgtggggatgagtgcgcccttctgaaggaaatttaattatgtttgagacttactatttaatcgggttagaagttcaactcatttctggacaaaccttgtgaacaagtaaagatttcactatagaaggcagttcagcatcaggactcaggacttaagtggcctggcaggaaatggctaatgcatggtcactgaagtccagggatttcactgagtcaagccagagaactaagaccctgagatacttgacagtcaagtgagacttcaggtaaaacctcaaactgtcactcatcagactggagctgtacttctttaagccattgatgctaggataattaattaccttcctgccctgatgtttcttaagttggagaaagagaattaaagagaatgaaaatcagaatcacattaacttccacctctattcaaagctgttttataaattagggagaagagtgaggagagaggaataggatagacgaaggtagagagagggagcagtggagaagaaaacctcagagtgaggcaaaggaagaggtgtgaaggggaaaagaagtggcgatggcagggaagagcccctggccatgagagagactggggggagtgggaaggaagggaagttatggggcagggggcacagagcagagaacaagagagtaaggctagagagatgaaagaaacagtgagactgagctaagaagagcgatctcacgcttaagagacagagggcgtgcctgtgacagggcgggagctacaggactggacatgatcaccgattcagggggagggagggatgcaggcagaggcctaactccagcatgttagcatgtgctatggaagtgctgtccacaatggtggccaccagtcatgtgtagtactttaaataagtctgttgtggctgaggacctaatttgtaattttaatttcattttaaatttaaatatccgtatgtggctcatggctgctgtattaggaagtgtagatctagagaaacagctagaaaaaggagagagcactggagtcacagtaggggaagaggtctagagcaggaccgtccagtggacatagaacccaaaccatgcacatgattttaaacattttagtagcagcatgaaaaaggaatagggacattaagttcaataatatattttattcagcccatgatatcgaaaacgttaccatttcaacaagtaataaatatgaaatattattaataagacattttacattttcttttttcctactaaggcttcaagatccggtatgcatttacactcacagcacctctcagtttggcctaacatttcatgggcctgggggctaccaaactggacctcacaggtctaaagagattgatctagagtcagagcaaactctagggagagctgatccaaagttagaaggagctttaaaaagatactgagtcagatacctctctaaagtcagagcgctctagagcattgctattcagtagaactctgttaatggaagtgttccgtatctgcattgctgtagccgctagccacggtgactactaagcacttaaaatgtggctggtgcaactaaggaaccaaattttcaacttaaatttgttttaactgatttaaatgcaaatagctgcatatggctagtggctgctatactggacagcacagccctagagacagagctactgagtagggaaattgaaggacatagtggtggtacatgtggaaaatggaggagagcctcatttgggcaagaaagaaccaagagggacaggattcataatggtgggtgagacagagggagtgacaaatacaagggagcaagaagggaagcaggatattgtgggagtgaggacaggatggtgagagacaggaatgtaatcaagggttgatcagctaggacagaccgagggagacatagcatgcaagagaaagacagagacagaacatgagacaggaccaggggacctaaagtggggtgtgggcatcagagggacaaaggaggaggtgatgaaccgacaggggaatgtgggggcacagagacagtggggagggagagtcaggagggagagggacatggtgtgggcggcacagggagcagggacagagtgataggagagaggagaggacaagtgagaggaaggaaggaaggagagggccgtgggagggagctggtaggagagtgaactgttcctcctttgtgttgctatctcagtatcattgaaagaaaatggcctttcccaaagcctctctgctgggtgaagccatccaaaacattttatttttctaagggaaaaacaactctgcctccatgcacaccatctattgttttgcatttagtaggcctgtgaaatgcctgattggaggaaggtccagcccccaatgttctgtatcatagccttgatggagtagcctcccccatttctggtgtggttgggtatagcccctgccttcactctgcttcccctgcccaggggaatgcagaggaagggatggcgcctttcaggcctgcagtgagtcatctctgcctgaaccaagcccattcatgctccatcgccttctagaatatgaagtcctcgtgtgtgggaggaaagctctgttcccttcccaacatacattccttttccttagcatggatgtggcccttcattaaaagagatcagttcagtcccctgctccctgcctgtgctttttctagcatgtgatccgagggaaccgccccatcaaaactgagatggcccatcagctatatgtccttcaagtcctaacctttaaccttctggaagaaaggatgatgaccaagatggaccccaatgaccaggtaggtgctaagtggggcagctgttttctcatggctgtggtgcagtccagccttagtctatgtgccaggcactgtgcttggtctttgtctgcagaagtagtttgcatctgccctagaaaatctagcatgatctgcaccatgagccaagcccatttctgtcctgctgtggtagaggtgatgcctcctaagggattgattggggccaaagtttggcccagaaaagcctgacccactgtttcttttccttgctcccttggttagccgattcacctgctgactgtctgtttcacctcgcaggctcaaagggacatcatatttgaactgaggaggattgcatttgacgcagagtctgatcctagcaatgcccctgggagtgggaccgaaaaacgcaaagccatgtacacaaaggactacaaaatgctgggatttaccgtaagtacctcagagcatagacggtggtaggccctctcccctgatgggaagtcaatggtcccacccagacagagctctgacaaccaaccccatggtggccctggaatagatgacagttaggaagctggtggagctttaatgcttgctttgctttgttgatggtgagtctgtgagtttatgtgcaaagtttggccctgtgaaacgaatccatctgtaggggggttgcggtcagctagagtgggtagagaggggacctgtcctcttacccaaactgctaggttctttgcaaagctagtgtgaatattttgtgatagagtagggcttgaggatggggttaactggaagaagtatttcttgcgtacctactcagtgtgcagcagcatgtgaagtaggttctgggatgcatggtgaggcagccaccgtccagcactcaagagctcacagttcagtggtggtgatgggtgtgaaaagagctaggacagaggtgggtgctgagtggtagcagcatcaagaggagaggcgagagggcatcccctcaggtccctgcatacacggagactgccgcatctcaaattgggtgtctttatttctctagaaccacatcaatccagccatggactttacccagactcctcctggaatgctggccttggacaacatgctgtacttggctaaagtccaccaggacacctacatccgggtaaaggcaggggagctggccttctcagtcctggtgccacatctcctgccttcctccttcatctccctaatcctccctttctcttcccccgacagattgtcttggagaacagtagccgggaagacaaacatgaatgcccctttggccgcagtgccattgagctcaccaaaatgctctgtgaaatcctgcaggttggggaactacgtaagtctctgcagctccctcttcttcagccattccttgtcatcaagagctcagtgagactcaaaattataaacagttacatgtcagtggggtcgggcgtggtggttcacacctgtaatctcagcactttgggagactgaggcaggaggatcacttgagcccaggagtccaaaaccagtctgggcaacatagtgagaccccatctctaaaaaaaaaaaaaaaaaaaaaaaaaaccaaaaattagccaactggtagtgcatgcctctggtcccaactactcaggaagctgaggcaggaggatcactgtgtcaggaggtcaaggctatggtgagcatagtcatgccactgcattccagcctgggcgacagagtgagactctatcttaaaaaaaaaaaaaaaaaaaagatgtcagtgggactagacaaccttaggtgggtttttaattttgttttttgttttaaatcactgcatcagctgataattccatcttatccttatttatgggaatcatggttgttgctttgtttgaactggcaatttgaatcatattccaaagctaccccatgcctgtgggtaagggctggctgagtctgtaacagggtagagggaaggcaagaaaatgcaccctggagaagaaagctaaggacgtgagaaacgcccatcccacgctccctgttaattgcgcgccttaggctgcttttgttcctcgggactttggtgcaaagtttccagacatgagctcccaggcccttgtggacagaggcttcatcttctccctgttttttcacttccacagcaaatgaaggacgcaatgactaccacccgatgttctttacccatgaccgagcctttgaagagctctttggaatctgcatccagctgttgaacaagacctggaaggagatgagggcaacagcagaggacttcaacaaggtcagtgtctccgggctgctctgaggcccacgggaggagaccatcacacgacagcctttgacagctggctggcacctggagaatccctgagctggaaaagcagcttggtctgcagaactgagtcacaagactgaggcactggggagcctcagccccatctggttgttgctccctctgtgaccttgagcttgtcttccacttggtgccgtaggccctcatttgtccattgaagttagcacctgtccctcccgtcctccagagaggtcaggaggataagcattagaagactcactgtggtttattgagtgcttactgtgcaggtactgctgtagttttgtgaactgggaaggttaggagagaagagtggactggcatgatgtgcacaccctgggtacttaatcgatagttatccctcggtgctttcagtcctcactctatgcagagcactgttgtgccaggccctcaaaagctgatcatctaggggtcgagtgttttgaagttgatcatctcatcataaaaaatttggaaagtataaagaataaaaagttacctgtatttacaccatccagtgacaaacatttttgttttcctctagtcttttttatcccctacaggtttttccttcattagcaagatcatactgcgcatgcagtgtggtatcctgttgttttctttaatagttgttttaaggggaccaatgcatttttttaaaacaccacagcgtgccagaactgcgcttgcctttctattcttttgtttgtttttttgagacagagtttcactcttgtcacccaggctggagtgcagtggcactgtctcggctcactgcaacctccacctccgaggttgaagtgatccttctacttcagcctcctgagtagctgggactacaggcgtgagccaccacacctggctaatttttgtatttttagtagagacggggtttcaccatgttggccaggctggtctcaaactcctgacctcaggtgatccgcctgcctcagcctcccaaagcatgagctactgcaaccggctggtatctcatattctttatggcaacacctatcaggagatgtgtcttcctttctctcggtttagagatgagtagatgcacacctaaggatgttaagtgacttgctgaagggacagagtcaagatgtgaacccatttctttctgactacaaaaatccatgctcatttcccccacaccattgaccaattgaaatatatgggaaataaagcatctatcagtgtcagtcatgtgacctgaataaccatctaagaaggtataccttactcacccagcagatgtctgtagtgcctgccctgctcaagaccctggggcaggaaagagccttggtgctccataataggcctgtccatttctcaagagtagtggtgtgagttggctgggttcttctcctcttaggttatgcaagtcgtccgagagcaaatcactcgagctttgccctccaaacccaactctttggatcagttcaagagcaaattgcgtagcctgagttactctgagattctacgactgcgccagtctgagaggatgagtcaggatgacttccagtccccgccaattgtgtaagttccatctcaggggaggctggcgggggaggtggctgccagctctgctttccttccagagctccactgtccccatgaccttccgctcactccagtgtgtgtccaccccagggagctgagggagaagatccagcccgagatccttgagctgatcaagcagcagcgcctgaaccggctctgtgagggcagcagcttccgaaagattgggaaccgccgaaggcaaggtgagaggagacggggcaatccttggtgccgggaagagcctgcctggatggccccttttgtgcccaggcctttcccagtactgtcgttgctcacctgtttggcttcccttgtgttccagaacggttctggtactgccggttggcactgaaccacaaggtccttcactatggtgacttggatgacaacccacaaggggaggtgacatttgaatccctgcaggagaaaagtaggttcatttctctgttgatgtgtcatggttgctggacttgtcaggagacaggagttctagtccagctgtttgtagctgatcatctgggcttgtacctgttacctctctggacctgtttccttatctgtcagcgatttcctctacctggcctactcggtggggtggtttggagaaacaatgagttcacaggtgtgaatgtattgtgtagactgtaaagggtggtacatgactaagtcgaaaggcagtagttaagaggagaagctgtgaagccagactgcccacattcaaatcctggctttgctcctaattaacttgaattctaattaattgcaagttctcccctctgccttggtttcttctcctgtaaagtgggaataatagccacactttcctcctaagaggattgcatgagtaatgtatgcaaagcacttagaagagtggttggcaggtagtcagcataactgttagcagctgccactgctgttggcgatgatggcatcatcatcgccattattgtgaaggagaggggaagggagtcaccaaggtcccgttccttggggatataaatccaagagccctgaagtgaccctcagttagctttgacacagcctcactgggctgtggtctacaggagtgaccaagacggagggaacagtacaaggccatcctccccaccaccctcactgagctcatacagcagcccttggagtttggggctgaggcttcctatgcatctgccccagtacctcccttccagcactgatgtaggcactgaccagcttgcagcatgaacttccagagactaattcccatcatttatcagttcctgttgcagacattaaggccattgtcactgggaaagattgtccccacatgaaagagaaaagtgctctgaaacagaacaaggtgagtagagaggccagtttgagtagctggcccagtgatacttggagagtgccattggtggtggttttttccaggtgcattcttggcatcttcccctctctattcctgaatgttttattaagaattttgaacatacacaaaaatagatggaacctctgtatacacatcacccagactcagcaaccatggccagttctgcccatccacttgtttctctcctttatcgctttgaagaaagtcccaagtatcacactgtttcatctgtaaatatttagtgtacatcgtatagtgtataacattgccaccagtccattagcacacataacaggaaatgaaagtagttatttcagatcaaatattccactgatggtgactttctaccaattgtcttataaatgtcataatttctctacagatatataaatgtttatatggatacacacacacacacacacacacacacacacacacacacacacacccccatacccatcttgtctaaaccagagtctaagactggtcttttaagtttcttaattcataagttcccccgcccccccatcccccaccatcttttcctttgcagtttattagctgaagaaccagattgcttgtttggtagtttcctagcatctgaattttgctgattgtttccccgtggtacagtttaacttgttcctctgtcccagatctgtacattggaagagggatctagaggtttgatccagttcaggtttaacttttttcctggccagtgtcatcagtggtattatgttctatcaagaggcacataacgtctggtggtctctccttttgtgataattagcagactgttgaagctcagtgcctcattccatcagtcaactaaggtttgcaaactcatgatattttgatgcagtcattgcttttcatttatgagctgaaccatgaaacttgcccttatctactattggtttcccagtggtacagtttatataggaaacgagaataaatgctgattcttcttttatgtacttactttcaaaataatgagttagttccttggtatcatgcaacagtgaccaattttgtgtgtgtgtgtgttttgttttgttttttaattgttaagacattcctatgccaaatacagcacgatagaagttgttagtcatcttggtaatataaaaacttttaggataacttacagtcatggatcgtgaccttccagggttctgagtgttgaaaatgacttttttccaatcttaaaaatatcacaacatctttgatgtgacttgggcagggagtgggtaagttaaggttgatttatgctgggcctcatctccagccacacttgtggccgcctaggagcattgatgacattcatctgaatcagcatgtttggtgatgatgccgagtcactaggactttggccaagatcttgatgtgcagaccccaggctgttccatcgctctaatttaaaccctttctccttcaggaggtgttggaattggccttctccatcctgtatgaccctgatgagaccttaaacttcatcgcacctaataaatatgaggtgagcagtgtggcgctgccttagacaacagagctatttctgtaactcttcagttggtggcaggaatgagcaaaacaggaaagtcccctgtggtgggtggctgcagtgtatattgaagcctaggaaggctttgagaagaaggtggcatttcaataggatgggaatgtctcaaaggaggagctgtggttgggggggcacccagatgaagcagcaggtatcattacataatgctggacctgaggttcctccaggcgcattgggtggctgccaaggatctgtcacactctggattgtttatctgtgagctgggctctccacattactcttcagcagcagccataggttgtcattacaaagataaggtcaactaggaatgagtcatttacctgggactgggaaaattctccccttttcagtttctctgtggtcagctacccaagagaacttgacagatccttcctcctaggggctcctggtcacatgttgtaatggatccagtgtggactttgaagccagatggaactggtccttctgacaagggccctgtagttccatctgcagcactggaagatactagatattaaatgagtgattgcatttgagaccctatgtgcctggtgagctctgagagccatcactgggaactagaggtgggacttctggcagaggagacacttgggcagggcctgagctgccgctagtggaatttggttgagaggaaatgaagaacaagcaagtggggaaccaggtgagcaacggtgtggaaaaaggaaaatggcagcagaggaagcaggaagagtcagggagcggtgggatcagaaggcttcctggtcaccccctcttagcatgagacccaccagttccatttctttagtatttactctttaatatgtattgactggattatttttaattttgttttcgggggggcggggcacaaaattgagatcccacagtgacttctgtttgtgtcttgcttcttttcacctaatacatatttcccttctctcgcttctgattttgggtaacttcaggtagatgatgccccagtactcagatctcattttgctgtattcgtttattgcatttttaggttctccttcatattattgtaaggagttgtaatataaaaccccttataaaaaccagatctcttgagaaagtgaaggatcacctcctaatttatctttgctatcattccaaatcagttttgcctatactgattagttccaaaaggaactgttgtgagccccatcagaaaagagaccttggcaggatctcctgctgaccaggggtcacgatgtgacattttgcaacttgctccccacagtactgcatctggattgatggcctcagtgcccttctggggaaggacatgtccagtgagctgaccaagagtgacctggacaccctgctgagcatggagatgaagctgcggctcctggacctggagaacatccagattcccgaagccccaccccccatccccaaggagcccagcagctatgactttgtctatcactatggctgagcctggagccagaaacgacggtacccaggagaagggattttgggcccaggagaaacacttacattctggtgccttgtcttttgcttgtacagaatctgtagtgattttggtggccagtaaatgccagccatttctcaaacccacctcggaccacccagagtttcctcttggtccctgtctactaagagtcatgaaggcagggtgctctgcccactccatcaccatgaagcctgggattgggccacgaggaacaaacagcagatgcccttgccttccagtccaagaaactgcttcttgaaatggatttaacaacagccactcaccttttcctcctgagcctgctctctgatcagctggatccccacgtgagcaacagctggcccaggaaaggctgcctgcagaggacaggtgtgttgggcgtgttgagagccttgaagtgactacctgtatcttagatctgagtacaagcctgaggcttttgcttttgtcttttttgatgagggctcactccagcttcatatggtgccaagacgttgctgcttctgaggttggctctaacatctctggtctttagagccaccagatctctctggcccatacagatatcagagcagacggaaatttctccctgcaagcgctcagtctcatcccagcaagtcaaagacctcctggccaagtcctgccctcttaagtctccaggaacgctgcagggaaaacccagctgaggcctgggcctagactgtggtgaggtcactagattctactgctcttcccccacattaataccttttccttcctcagagagaaatctcccctaacctgaattgcagccccctccagtttgctttcctttggccttccagaccccaggaagttggccttcccttcctagtgctatggtttctgccattggccatgatttcagggagctggctgaggccggctgaggccacacctgtgccagtggggcttccctggtgctgcagcacttgtaaaccacacacacagcctctctccctggacatacgttagcacattggcattcagtattggtggcctggcatggtaggtactacccaatgaagagtgtactatatattttcattactataggccatacttatacagacgtgtatatatatttatataagatctacctatcttaggatggaaccttggggaaaaataaaattgaggggaagtaaaaagtatgtaacacttccagttgtgagccaagattgtaaccagagagcagccaggagcttcctgtcagtaaccatgttttcaataaatactctttcatgtacaaa

SEQ ID NO: 1025 - DNA, 1305 bp, Homo sapiens
caattaattgccagccttggttcacactgatgagtgtgctcattggagagactcagcatgcaaaagaaaagactcatcaatttgcagttatttaatttcacgaactgccggatggtggagtcagtagcagcggctgggccgcaacatggcgcctcccacctagacttccggtcaggaaacttccaccttcctccgatttacgtgggcctgcatgagcctacttctcttcttattctagtgccagtggcctctggagtcttggtccttcttactggaagtagccctcctctcctgttacagaggcaataattctccagccttccggtcgccgccaaagcctcctgcctaatcacttcctgtattgtctccctgcggctctttgcacagaccttgggctctgtcgtctctggattcttactgatctcttcctcttctcccaaccgccttgtcatgtctctttgagctatgtcaggaggaacggaagggcactttcttactacttttgttagccaaacggacaaactgtcccctcccctttgttgtaaccacacattcaaggcttccttcagtccagccccatctcccttttcgttgcctccctttcactactccaaatgagcttgccatactttaaacgggtcttgtactttcttatcccttctctggaatgtcatttctactgaagaaaatcctactcttccctcaagacccttctttaatcccctcttgccatggaaacttgagattttcattgaggagctaagttggaaaatataaactagagctgagtctctaccctggcactattgacatttggggccagattattcttggttggggagactgttctgtgcactgtaggatgtggagcagcctcccaggcctctacctgccaaaagcacactcccctttccccaagtggtgacaaccaactgtttccagacattgccagatgtcctgaggtgggagtgagggtgaacagaattgcctcccagctgggggctgctggactaatcaacaagaagtggcaaggactgcaggcaaattgcctcagcacttagatttagcactgcaaggccacttcgacaggtggtagtgatttgtgcgtctcatttcctattcttgattgtgacaaggttctggaggatggagacagctacccctgccacagttcccacaggctatgttgtacatagggcttcatatttaacatgtgagtgaatgaaacacatgagcccgagtgctcttcaggacggcaaggcctacatcaagatggtaaaccttcagttcttaaaaaaaaaaaaa

SEQ ID NO: 1026 - DNA, 285 bp, Homo sapiens
gaaatatcaaacatctgaggagcttataattagttaagcatttacgtgtattaatatatcgtcatgtggacagttgagaggggagaaggcactagacaaatttaaaattgttagaaaccattggcaactgatattcagagcctaagttaaaagcaggatatgtctcaggagcaaatcttttgtgtaaatcctggtatttttactgcagacctttaaaatgacagacgcgggtgagtaaaaattacttctggaaatggatatgattaattaattcaattaattaat

SEQ ID NO: 1027 - DNA, 274 bp, Homo sapiens
tttgtggttcaagcagtttgtgaaagatttgaaagctgcatacatttggggtcaccccaaaaagtcagccctgggccacgagcagtggcagaggaagcagttacagagaattaacagagttacataaaatttactcactttgtaggcaaatatttctaaccttggctccctttcttaaagatctatttccccagctttgttccccagctcaaaagcatttcccaacacgtggatctgctaccactggatctgccaaagcagaatcctctttttt

SEQ ID NO: 1028 - DNA, 1127 bp, Homo sapiens
gatttttgtcttcagccgtgcaactatgttggggtcatcttattcctccttttcggcggtggacacaggcaaaaacattttaatacaatggaagtgcatcccctggcagccctgcggcagtcacagcctccttattggcaaggctgaagtcaaagccttgggctgcccagcctgaatgacactggcttcctgggatggttgttgctgtgtcagggacatttctgggtctctgccactgctactggtgctcttggtggagaaggccacagggtgttgctggggaggtggtgagccagaggtttctgggtctgcaccactgctgctgttgctctgggtataggggtaggccacagggtcatgctgggcggcttgttgagcctgggatgtttctgggtctccaccactgctgctggtgctctgggtggagaagaaggccacaggctgatactggaaggcttgttgagccagggacatttctgggactccaccactgctacaggtgctctgggtggaggggaaggccatggggtcatgctgggggccttgttgagccagggaggtttctgggtctgcactactgttgctggtgctctgcgtggagggggaagacacagggtcatgctggaaggcttgttgagccagggacatttctgggtgtatccagttgtgcaggtctcctcctcttgcatactctgttactaaataaataacagggtgatgctcaggggcttgttgagccagggatgtttctgggtcttcaccactgctgctgttgctctgggtggagggggaggccacagggtctttatgtatttaagcataaaggcaaggcttggcgcggtggctcatgcctgtcatcctaacactttgggaggctgaggcgggtggattgcttgatcccaggagttcaagaccagcctgggtaacatggcaaaacctcatctctatagaaaatacagaaattagccagctgcagtgcatgcctgtggtcccatctactcggaaggctgaggtgggaggatcacctgaacctggaaggtcaaggctgcagtgagccaagattgtgtcactgtactctagcctgtgttagagagccagacactatctcaaaataaaataaaataaaa

SEQ ID NO: 1029 - DNA, 1115 bp, Homo sapiens
agccgagcaacgatgttggggtcattttgatacatgcttcttagtggggggcacaggctggaacgttttgatacaatggaagtgcatgccctggcagccctgtggagctcacagcctccttattggcaaggctgaagtcaaagccttgggctgcccagcctgaatgacactggcttcctgggatggttgttgctgtgtcagggacatttctgggtctctgccactgctactggtgctcttggtggagaaggccacagggtgttgctggggaggtggtgagccagaggtttctgggtctgcaccactgctgctgttgctctgggtataggggtaggccacagggtcatgctgggcggcttgttgagcctgggatgtttctgggtctccaccactgctgctggtgctctgggtggagaagaaggccacaggctgatactggaaggcttgttgagccagggacatttctgggactccaccactgctacaggtgctctgggtggaggggaaggccatggggtcatgctgggggccttgttgagccagggaggtttctgggtctgcactactgttgctggtgctctgcgtggagggggaagacacagggtcatgctggaaggcttgttgagccagggacatttctgggtgtatccagttgtgcaggtctcctcctcttgcatactctgttactaaataaataacagggtgatgctcaggggcttgttgagccagggatgtttctgggtcttcaccactgctgctgttgctctgggtggagggggaggccacagggtctttatgtatttaagcataaaggcaaggcttggcgcggtggctcatgcctgtcatcctaacactttgggaggctgaggcgggtggattgcttgatcccaggagttcaagaccagcctgggtaacatggcaaaacctcatctctatagaaaatacagaaattagccagctgcagtgcatgcctgtggtcccatctactcggaaggctgaggtgggaggatcacctgaacctggaaggtcaaggctgcagtgagccaagattgtgtcactgtactctagcctgtgttagagagccagacactatctcaaaataaaataaaataaaa

SEQ ID NO: 1030 - DNA, 1144 bp, Homo sapiens
gatttttgtcttcagccgtgcaactatgttggggtcatcttattcctccttttcggcggtggacacaggcaaaaacattttaatacaatggaagtgcatcccctggcagccctgcggcagtcacagcctccttattggcaaggctgaagtcaaagccttgggctgcccagcctgaatgacactggcttcctgggatggttgttgctgtgtcagggacatttctgggtctctgccactgctactggtgctcttggtggagaaggccacagggtgttgctggggaggtggtgagccagaggtttctgggtctgcaccactgctgctgttgctctgggtataggggtaggccacagggtcatgctgggcggcttgttgagcctgggatgtttctgggtctccaccactgctgctggtgctctgggtggagaagaaggccacaggctgatactggaaggcttgttgagccagggacatttctgggactccaccactgctacaggtgctctgggtggaggggaaggccatggggtcatgctgggggccttgttgagccagggaggtttctgggtctgcactactgttgctggtgctctgcgtggagggggaagacacagggtcatgctggaaggcttgttgagccagggacatttctgggtgtatccagttgtgcaggtctcctcctcttgcatactctgttactaaataaataacagggtgatgctcaggggcttgttgagccagggatgtttctgggtcttcaccactgctgctgttgctctgggtggagggggaggccacagggtctttatgtatttaagcataaaggcaaggcttggtgcggtggctcatgcctgtcatcctaacactttgggaggctgaggcgggtggattgcttgatcccaggagttcaagaccagcctgggtaacatggcaaaacctcatctctatagaaaatacagaaattagccagctgcagtgcatgcctgtggtcccatctactcggaaggctgaggtgggaggatcacctgaacctggaaggtcaaggctgcagtgagccaagattgtgtcactgtactctagcctgtgttagagagccagacactatctcaaaataaaataaaataaaataaaataaaaaaagaaa

SEQ ID NO: 1031 - DNA, 1729 bp, Homo sapiens
ttttttttttttttttaagtggcagtactgcagggctgacagaatctgcctgaacatggtccgggcctcctcttcctcctcgatgtggccatagtggtatatctggtggtgcaactctcctcctctggtttactccctcaccacctggaagagctgaatgatatttgggtgatggaaagtcttcaagatggcaacctgggtcccagttggcctatgctgagccagttccctatcagatggtgtctatgaactgatagttttgtatctccttgtcaagtgaggtggagggtgatccctgctccatggtgcctcccaactatactgactacaaatcctgcctctaaaagctatgctgtgatgcacagcactaactgtgctagctaggctaaggccactgtcggtgacaataccccaggctccaaaccctctgggtctgagggccgttcccttccacggttacacagattcccacccctccctgcccatctacccaccatgcggggaaggtgccaaggagtagacacatggacagtcgttctggtgtctcctggtggggccagactgggcaccatggctgcaagcacagacagggcagagaagaggccagggccacgtggtggagctgggtctaaaacaggactcccaagggcaaaggccctgcccagacttggcacccacagtcttctgctgaatgctatgagcccgcttcagtgaaagagggaaggtggaaacttcaatgtagagaggacaagtgggatccccaggaggaagggtctgtggtctgatagtggaccgcttcttctgttttgtttgttccaaaacaaggtaggtggccatgggataactgaataatttttctttgattgccacagataggttctcagcctggaatcccatggccaccaaaagctgggttgttttgggattcaggtggtccaggatttgttcttcatgttgtcagaggcaactcctgaccactgttcacccacgggtccctcataacttcttctagtgtggtctgctccctggggtctactgttaatagttttttaatgaggcttttaagacctcaggaaaagtagactggggaaaaatagcttccactttaaatttttgctgagaggaccctaatgctgcatgagcagaagggcagaaccccagccaccatgtggtataaaattactctgaggctctgaatatccatggtggcacattggtagcactggcctaggatacgtttcagggccatgtaggggttaagtgctacaaagggctgtcagcttctgcccatcatggaatgtggtaccaaagccgaagtctgcgatcttaacgttaccgtcctcatcaaggatgatgttttctgggttcaggtctctgcgcaatttgctatggcactactgcatggccgacagaatctgcctgaacatggtctaggccttctcctccctcatgaggccatggtggtgtattggttgcgtgggtgtcctcctcttgcatactccgttactaaataaataactggtgttgggggtgtcaatcacttgatacaaccgtacaatattgaagtgacagagtaactttaaaatacttatcactctctggagagtgatgccaagggagccagccttggggatgattttgatggccatttgggtcccaatcagcatgtgatcctggacctcactgaacgtgccacggccaatggtgtccaggattttacagttctgga

SEQ ID NO: 1032 - DNA, 696 bp, Homo sapiens
agtgtgcccagtgccacaccgtggaaaagggaggcaagcacaagactaggcctaatctccaaggtctcttcgggcggaagacaggtcaggctgttggattctcttacacagacaccaataagaacaaaggcatcacctggggagaggatacactggtggagtatttggagaatcccaagggtatggaagaaaaatgatctttgccggcattaagaagaaggcagaaagggcaggcttgatagcttatcttaaaaaagctactaatgagtaataattggccactgccttatttattacaaaacaaatgtctcatgactgttttatgtgtaccatactttaatagatctcatacaccagaaatcagatcataaatgacagaatattttgttgggcagttgtgatttaaaactaagactagcttgtggttaaatgttcagtttttgaattttaatagtaattccaattcagaacatggtatcactgtttaccccttctaaaaatatgattagactttgttagtaatgttcaacttctcacaaagatggtgagtgccatcttaaaacttaatagaggccgggcgcagtagctcatgcctgtaatcctagcactttgggaggccgaggcgggtggttcacttgagttcaggagttcgagaccagcctggccaacatggtgaaacccccgtctctactaaaa

SEQ ID NO: 1033 - DNA, 5304 bp, Homo sapiens
ttcccaccgcatcgtccgcctcagccagaaccttctggtccccgcccccggatagggacccaggaggcccaagccccttcttccggcggggagtgggagcctctcgcactctcggcagctccagaccctcgggatctccgtttacagttcaggacctcagctgcactttggcgctaacgccctgtttcccaggtggggaaatcaagagatggggttccttggaatgggaagtggggtgtgaaggggaaacctttttggccaggagaatcaggtgttccatatctgggagctattgagcagcttgagcagactttgtaggttcaagcccttctggagtggttgacagtgacttctgggcggtggggatggggtgaaccatctttaaactttgtgcgaagaggtgcagggacctaggtttagaagcgctctcgtcccatgttggttctgccgaatatttaggctgactcctgacctcaagtgattggcccgccttggcctcccaaagtgctgtgattgcaggcctgagccaccgcgccgcgacctaggctggacatttgacaaagacttttacttctacctctacttcctcttagaagatgtggcaagaaaaggatccggggggcccgggcccggtggctcacgcctgtaatcccagcactttgggaggccgagacgggcggatcacgaggtcaggagatcgagaccatcctggctaacacggtgaaaccctgtctctactgaaaatacaaaaaaattagccgggcgtggtggcaggcgcctgtagtcccagctacgggaggctgaggcaggagaatggcgtgaacccgggaggcggagcttgcagtgagcggagatcgcgccactgcactccagactgagtgacagagcaaggctctgtctcaaaaaaaaaagaaagaaagaaagaaaaggatcctgggattaaatacttttttaaatcccatattctgggattaaaaatatgcttgacagcattcataccctccgcccaccttgccatggtggtgtaccacagtagtccctctcttggatatgtgctctgaaggtcaagatatcaagcaccagaagcctttcacagggtgtttggaatagataactgtcccttgggtgtccctttctcattctaaggcagcccagatatttgaacacttagtactttgcaaagagcctacatagatcatgagaaacatactagttggagaaaatcaacaaatccccctatactaaccattgtcaggagcaggtcttctggtctgaaatgtcaccaacgtttttttcttttttgagacggagtctccctctgtcacccaagctggagttcaatggcttgatcccggctcaccgcagcctccattcaagtgattctcctgcttcggcctcctgagtacccgggattacaggcacccaccaccacgcctggctaatttttgtatttttagtagagacggggtttcaccctgttggccaggctggtcttgaactcctgacctcaagtgatccacccacctcggcctcccaaagtgctgggattacaggtgtgagccactgtgcccggccaacagttctttttttaaaacgaacttttctatctcacaaacggcggtgaaggtgtcaaaattttcacagtatttctggggcaattactggataggatgagatctgctgctatcttctgtgggagaagaaggggcagagaaatacacttggctagaaagaaaagggacctgctatgcccactaacaaaataggtacgtgctaaaaaaaattagcttctgaatttagtaaaacttcttatatactggcaatgttgaaggagaatgatggaaaattctaattttacttgcataaattttcagttagcaatatcctcacagccctttttaatcttcaaaggaaaaagaaaattaaggtcttatggaaccagtaggtcttccatagatggaaaacaaacaaatcagaaaaacaaatttaaaaccacacccacacctagaaaaacaaaaatctttaacagttttttgactggactttggaagtgttttctcccagcctggtgtagctcctctgaggtggtatataaataacccaggggtctgcaagttgctcccttgtgctagaaaatgcagaggcctttggggccaggagatgatctcagtaatgaatagtgaaagctagagttgtttgaaaggaatagcataagaaattctcaaaatagacaatgcaagagggcttatataaatgcagattgctgggtcccacgtggagtttgttcctgttggtctgaggtggggcccaaaaatgtgcatttctgcaagtttccaaatgatgctgaagctgctactacagggttcatacatcgcgaacctcaaaatatatatatatatatatatatatatatatatatatatatatatatataattttttttttttttttttttttagatggagtcttgctctttcacccaggctggagtgcagtggtgcgatcttgactcactgcaacctccgcctcctgggttaaagcaattctcacacctcagcctccccacagagctgggactacaggcatgcgccaccacgcccggctaatttttgtatttttagtagagacagggtttcaccatgttggccaggctgttctggaactctgacctcaagtgatccgcccgcctcagcctcccaaagtgctgggattataggcatgagccactgtgtccagccacaaatatttttaagacatgacttttctgagcttcttctaatctcaagtaataaggtctcatcatgaagtcccagaagcttctgtcacctcagaagataaagactctgtcattagcagctaacaacacagcataggtcctaacagtggacctatattcatttcagacaaatccattgcctcatctataaaatgggttaagacctacttccaaaggcttgtgaaaaagtttaatataaagttttagtacacatagcagttgccagatcaatacttgtaatcattccctacttccctttattagaattactaatatctaggctgggcgaagtgggtcacgcctataatcccagcactttgggaggccgaggcggtggatcacctgaggtcaggagttggagagcagcctggccaacatggcaaaactctgtcactacaaaaaaatacagtgagccaagatcgctccactgcactccagcctgagtgacagagcgagactcttgtctcaaaaaagaaaaaataaaataaaataaaataattactaatatcctaacacctgttggaatctattcatgggaactatagaacaagtttatgtctatagtgagacagagatgggaatttgaaaggccatgctctcatgaaaagcatgtcagggaaattccatgctctgatttccctcctttaggactgtcaatggcaggataccagctctggtcaccatggaccccactggatgagagtttccaatggctgcggcacacgacacctacaccttcctccaagcacccattcaaggcctccccctgcttcccacacacaccgtccgaccttgaagtgcagctgtgctttcaagaggtcactctagtcctagacagcccattcctggaatctggagtgagtcccaagttaccctgccacacatcagagttgcgcacgatgaacaacaaaggactggtcaggaagccccagcccatccgcctcagtggagtagattctgtctttggcagggttatcacagctcagccaccaaagtggaccgggactttcagagtttcagacaagtcagccttttgcaaaatcattagcagggagcaccagtggcccattggactgaaggagcctcagattcagatgacagtcactatgtgcaaacagatgctgcgctctatcctcttgctgtatgcaacttacaaaaagtgcacctttgccttgcagcactccaagtaaagggtcctcatttgatccccatttactcacaccatgccctttggtatgtacctaaagcttacagaaacctgtccatgtaaatgaaactgtgacattgtcccagccatcttgcttttgtttcaagcagtgatgattcaggagcccctttcatcccttcccctccaaaaaaggaccaatgatagagaacaaggaagaacattcccattgtaaggttgaaccatttagagtcaaactagcattgacatgtccatgtgataaccgttaaacaaatgatataaaccaatgagcctagtgtgaactcacataaacacctacaaccacaatgaattggggggaaaaggggtgtagaggagaaagatgtatggatttctatgtaccaggggatgtcaaaaatctatatatataggtcaaggattactttaaaacctcccccgaccaaaacaatgaaaataagaaaaaaaccctaaccaaccacaccctaataccactagagtgtacaaaagtgggtagaaatactgatattaaacaatacttacagcctggcaagaaagaacttggtagcagcactgaagctaggctttctggtaggctacatggaactcatgagtctccattttagctgaaatgtactcctaatgtaattttgtagcatttttttggtttttggagacagggtttcattctgtcatcacggctggactacagtagcatggtcttggctcactgcagcctcaaactcccaggctcaagtgatcctcccgcctcagcctcctgagtagctgggactacaggtgcgggccaccatatctggctaatttttgtattattattattttttgagatggagttttgctcttgttgcccaggctggagtgcagtggcgccatctcggctcaccgcaacctctgcctcccaggttcaagcaattctcctgcctcagcctccctagtagctgggattacaggcatgtgccaccacgcccagctaattttgtgtttttagtacagacagggtttctccaggctggtcgggctggtctcgaactcccgacctcaggtgacctgcccacctcagcctcccaaagtgctgggattataggcatgagccactgcgcccggccattaatttttgtatttttttttttttagtagagatggagtttcaccacattgcccaagctggtcttgaactcctggactcaagcaatgccttggcctcggcctcccaaagtgttgggattacagcggtgacccacaatatctggccttagtagcgttcttgtaactaggttaggtataactcagaaaatggaaataaacattacatatacaaagttaa

SEQ ID NO: 1034 - DNA, 945 bp, Homo sapiens
agtgtgcccagtgccacaccgtggaaaagggaggcaagcacaagactaggcctaatctccaaggtctcttcgggcggaagacaggtcaggctgttggattctcttacacagacaccaataagaacaaaggcatcacctggggagaggatacactggtggagtatttggagaatcccaagggtatggaagaaaaatgatctttgccggcattaagaagaaggcagaaagggcaggcttgatagcttatcttaaaaaagctactaatgagtaataattggccactgccttatttattacaaaacaaatgtctcatgactgttttatgtgtaccatactttaatagatctcatacaccagaaatcagatcataaatgacagaatattttgttgggcagttgtgatttaaaactaagactagcttgtggttaaatgttcagtttttgaattttaatagtaattccaattcagaacatggtatcactgtttaccccttctaaaaatatgattagactttgttagtaatgttcaacttctcacaaagatggtgagtgccatcttaaaacttaatagaggccgggcgcagtagctcatgcctgtaatcctagcactttgggaggccgaggcgggtggttcacttgagttcaggagttcgagaccagcctggccaacatggtgaaacccccgtctctactaaaaatacaaaaattagccaggcgtggtggtgggcacctgtaatcccagctacttgggaggctgagagagaactgcttgaacccggaaggcagaggtgcattgcagtgaaccaagatcgcgccactgcactccagccagaatgactaagcaagactccatctcaaaaaaaaccccaaaaaataaaaacaacaacaacaacaaaaacttaatggagattggttttatatttagatttatttaactggttatgtg

SEQ ID NO: 1035 - DNA, 3503 bp, Homo sapiens
ttgtttttttttttgagacggagtcttgctctgtcatccaggctggagtgcagtggcacaatctcggctcactgcaagctccacctcccaggttcacgccattctcctgcctcagactcctgagtagctgggactacaggcgcccaccaccacacccggctaattttttttttttttttttttttgtatttttagcagagacagggtttcactgtgttagccaggatggtctcgatctcctgacctcgtgatccgcccacctcggccccccaaagtgctgggaatacaggcgtgagccaccatgcccggccgacaaattgatttttgacaagggtgccaaaataatttcagtggtgaaaggaccatcttttcaacaaatggaactggaaaaactggatatccatatgcaaaagaatgaagctaaatccttaaaatacactatacacaaacattaactcaaagtggatcaaagacctaaatttaagaaaataagagaaaaccttcatgaccttggattcggcaatggtatcttaagcataacaaccaaaaggacaagcaacaacaacaaaaaaagtaaagagtgggttgtccggctttggagtggcaaccttcgtggccccagggactaaaaagagaattaaatacaagtgatgttgagaaaagcaagatttttgttcagaagtgtgcccagtgccacaccgtggaaaagggaggcaagcacaagactaggcctaatctccaaggtctcttcgggcggaagacaggtcaggctgttggattctcttacacagacaccaataagaacaaaggcatcacctggggagaggatacactggtggagtatttggagaatcccaagggtatggaagaaaaatgatctttgccggcattaagaagaaggcagaaagggcaggcttgatagcttatcttaaaaaagctactaatgagtaataattggccactgccttatttattacaaaacaaatgtctcatgactgttttatgtgtaccatactttaatagatctcatacaccagaaatcagatcataaatgacagaatattttgttgggcagttgtgatttaaaactaagactagcttgtggttaaatgttcagtttttgaattttaatagtaattccaattcagaacatggtatcactgtttaccccttctaaaaatatgattagactttgttagtaatgttcaacttctcacaaagatggtgagtgccatcttaaaacttaatagaggccgggcgcagtagctcatgcctgtaatcctagcactttgggaggccgaggcgggtggttcacttgagttcaggagttcgagaccagcctggccaacatggtgaaacccccgtctctactaaaaatacaaaaattagccaggcgtggtggtgggcacctgtaatcccagctacttgggaggctgagagagaactgcttgaacccggaaggcagaggtgcattgcagtgaaccaagatcgcgccactgcactccagccagaatgactaagcaagactccatctcaaaaaaaaccccaaaaaataaaaacaacaacaacaacaaaaacttaatggagattggttttatatttagatttatttaactggttatgtgaatatatttaaatactggggaaatttcctcactgtcttagaaccaagcaagattcaactgtgtttggtgttcatttgcctcttaaaggctaggattgaaggaaaataaggtagcaatgtctagtttattatttaacacttctcacattttatacatgatctataaggtcacatgcttttaaaatagtaacaagttaaacttcactcttgaattctttacactctaactcaaactaagttatgattcaggattgtctttaaagaaccattcgaaaacataaaactgctgcgtatttgtgattgggaatggtgcttttgccaacttaaaatgattagaatacacactttaaaactatgtgtgatcatacgactcaaaataattaagaaaatcacagatcaaaaaaataataaaataacataaaaaataaggccagatgtggtggctcatgcctgtaatcacagcactttgggaggctgaggtaggcagatcacgaggtcaagagatcaagaccatcctggccaacatgtgaaaacctgtctctactaaaaatacaaaaattagttgggcgttgtggcacaggcccatagtcccagctacacgggaggctgaggcaggagaattgtctgaacccgcaaggtagagattgcagagagtcgagatcgtaccactgcactccagcctggtgacagagctagactccatctccaaaaaaaaaaaaaaagataaatttgactttatcgaaactaaatacttttgtacatcaaaggacactatcaagggagtgaaaacccatagaatgggagaacatgtttgcaaatcatatgtctgataagggatcaatatccagaatatataaataactcctatacctcaacaatgacaaaaacccaatttaaaaacgggcaaagggctgagcacagtggctcgtgcctgtaacaccagcactttcagaggcagaggtggttagatctcctaagctcaaaagttcgagaccagtctgggtaacatgacgaaaccttatgtctaccaaaattgcaaaaaattagcggggcaccatggtgcgcacctgtggtcccagctactcagaaggctgacatgagaggatcgcttgagcctcggaagtggaggttgcagtgagccaggatcataccactgcactccaacttgtgtgacagagtgagacctcatctctgaaaaacaaaacaaacaaaaatgggtaaaggacttgaatagacatgtctacaaaaatatagaaatggccaagaagtatgtgaaaagatgcttaacatcattagtcattagggaaatgcaaatcaaaccacaatgaggtatcactccgtactcatcaggataattataattaaaaaatagggccaggagaggtggcaggtacctgtagacccaggtactcaagaggctgaggagggaagactgcttgagcccaggagtttcaggctgcagtgaactatgatcacgccactgcactgcagcctgggtgacagagcaagatcctatacataaaaaaaaaaattaaattattaattcattaaaagcaaaattattattattattattattattattattattattattattattattattatttgagacagagtctcgctctgttgccccggctggagtgcagtggcgcaatctcggctcactgcaagctctgcctcccgggttcataccactctcctgcctcagcctcccaagtagctggtactacaggcgcacaccaccacgcctagctaattttttgtatttttagtagagacggggtttcaccatgttagccaggatggtctcaatctcctgacctcgtgatctgcccgcctcggcctcccaaagtcctgggattacaggtgtgag

SEQ ID NO: 1036 - DNA, 1729 bp, Homo sapiens
ttttttttttttttttaagtggcagtactgcagggctgacagaatctgcctgaacatggtccgggcctcctcttcctcctcgatgtggccatagtggtatatctggtggtgcaactctcctcctctggtttactccctcaccacctggaagagctgaatgatatttgggtgatggaaagtcttcaagatggcaacctgggtcccagttggcctatgctgagccagttccctatcagatggtgtctatgaactgatagttttgtatctccttgtcaagtgaggtggagggtgatccctgctccatggtgcctcccaactatactgactacaaatcctgcctctaaaagctatgctgtgatgcacagcactaactgtgctagctaggctaaggccactgtcggtgacaataccccaggctccaaaccctctgggtctgagggccgttcccttccacggttacacagattcccacccctccctgcccatctacccaccatgcggggaaggtgccaaggagtagacacatggacagtcgttctggtgtctcctggtggggccagactgggcaccatggctgcaagcacagacagggcagagaagaggccagggccacgtggtggagctgggtctaaaacaggactcccaagggcaaaggccctgcccagacttggcacccacagtcttctgctgaatgctatgagcccgcttcagtgaaagagggaaggtggaaacttcaatgtagagaggacaagtgggatccccaggaggaagggtctgtggtctgatagtggaccgcttcttctgttttgtttgttccaaaacaaggtaggtggccatgggataactgaataatttttctttgattgccacagataggttctcagcctggaatcccatggccaccaaaagctgggttgttttgggattcaggtggtccaggatttgttcttcatgttgtcagaggcaactcctgaccactgttcacccacgggtccctcataacttcttctagtgtggtctgctccctggggtctactgttaatagttttttaatgaggcttttaagacctcaggaaaagtagactggggaaaaatagcttccactttaaatttttgctgagaggaccctaatgctgcatgagcagaagggcagaaccccagccaccatgtggtataaaattactctgaggctctgaatatccatggtggcacattggtagccctggcctaggaaacgttccagggccatgtaggggttaagtgctacaaagggctgtcagcttctgcccatcatggaatgtggtaccaaagccgaagtctgcgatcttaacgttaccgtcctcatcaaggatgatgttttctgggttcaggtctctgcgcaatttgctatggcactactgcatggccgacagaatctgcctgaacatggtctaggccttctcctccctcatgaggccatggtggtgtattggttgcgtgggtgtcctcctcttgcatactccgttactaaataaataactggtgttgggggtgtcaatcacttgatacaaccgtacaatattgaagtgacagagtaactttaaaatacttatcactctctggagagtgatgccaagggagccagccttggggatgattttgatggccatttgggtcccaatcagcatgtgatcctggacctcactgaacgtgccacggccaatggtgtccaggattttacagttctgga

SEQ ID NO: 1037 - DNA, 130 bp, Homo sapiens
aaaaaaaaaaaaaaaaacaaaaagaaaaaaaaaaaaaaaaaaaaaaaaaaaaaaaaaaaaaagaaaaaataaaaaaaaaaaaataaaaaaaaaaaaaaaaaaacaagaaagacaaaaaaaaataaaaaga

SEQ ID NO: 1038 - DNA, 143 bp, Homo sapiens
aagaaaagaaaaaaaaaaaaaaaaaaaaaaagaaaaaacaaaaaaaaaaaaaaaaaaaaaaaaaaaaaaataaaaaaaaaaaaaaaaaaaaagagaaacaaaaaaaaaaaaatagaaaaaaaaaaaaaaaaacaaaaaaggag

SEQ ID NO: 1039 - DNA, 151 bp, Homo sapiens
aaaaaaaaaaaaaaaaaaaagaaaaaaaaaaaaaaaaaaaaaaaaaaaaaaaaaaaacaaaaaaaacaaaaaaaaaaaaaaaaaaaaaaataaataaaaaaaaaagagaaaaaaataaaaataaagaaataaataaaaaaaaaaaaaaaaa

SEQ ID NO: 1040 - DNA, 151 bp, Homo sapiens
  misc_feature (4)..(4): n equals a,t,g, or c
  misc_feature (45)..(45): n equals a,t,g, or c
  misc_feature (89)..(89): n equals a,t,g, or c
aaanaaaaaaaaaaaaaaaaaaaaaaaaaaaaaaaaaggaaaaanaaagaaaaaaaaaaaaaaaaaaaaaagaaaaaaaaaaaaaaaanaaaaaaaaaaaagaaaaaaaaaaaaaaaaaaaaaaaaagaaaaagggaaaaaaaaaaaaaaa

SEQ ID NO: 1041 - DNA, 118 bp, Homo sapiens
ggattacatactgttgccaactgaaggttggaataaacttgtcagctggtacacattgatggaaggtcaagagccaatagcacgaaaggtactgtttaataataactgactataaata

SEQ ID NO: 1042 - DNA, 5088 bp, Homo sapiens
  misc_feature (5)..(304): n equals a,t,g, or c
  misc_feature (3943)..(4892): n equals a,t,g, or c
tattnnnnnnnnnnnnnnnnnnnnnnnnnnnnnnnnnnnnnnnnnnnnnnnnnnnnnnnnnnnnnnnnnnnnnnnnnnnnnnnnnnnnnnnnnnnnnnnnnnnnnnnnnnnnnnnnnnnnnnnnnnnnnnnnnnnnnnnnnnnnnnnnnnnnnnnnnnnnnnnnnnnnnnnnnnnnnnnnnnnnnnnnnnnnnnnnnnnnnnnnnnnnnnnnnnnnnnnnnnnnnnnnnnnnnnnnnnnnnnnnnnnnnnnnnnnnnnnnnnnnnnnnnnnnnnnnnnnnnnnnnnnnnnnnnnnnnnnnnnnntgagatagaatctcactctgttgcccaggctggggtgcagtggtgcgatctcagctccccacaacctctgcctccagggttcaagcaattctcctgcctcagcctcctgagtatctgggattacaggcatgcaccactacgcttggctaatttttgtatttttagtagagacggggtttcaccatgttggccaggctggtcttgaactcctgacctcaggtgattcgcccgccttggcctcccaaagtgctgggattacaggcatgagccaccgtgcctggctgaaagttcattttcaatagcatagtccagaccattttttttctaaatgtgctaccagaatcaaagaaataataacattccattaaaacaaataaaatggcattaaattaaatgttctgcataatttaagagccctgaccaattttagtcttttttttttttttgagacagagtctcactgtgtcgcccaggctggagtgcagtggtacgatcttggctcactgcagcctccacctcctgggttcaagtgattctcctgcctcaacctcccgagcagctgggattacaggcatgtgccaccatacctggctaatttttatatctttagtagagatggggtttcaccatgttggccaggctggtctcaaactcttgacctcaggtgatctgcccgcctcggcctcccaaagtgctggcattacaggcatgagtcactgcgcctggcctagtctattattaacaaataaaaattttaatacataaaaatggatggatattttctagagccttaattaagtaattcactccaaatgtcttttttttttttttttttagctagtaagtggagacactttgaaacatggtgcttaaaaaaaaacacactacctacctggtgggctgtttcatggtgaaataacttattctgtataatttgaatgcaattcagatactatgtagatgttaaaaagctaagttaacataaaatgtacatcatgaaacgtcaccttacttgacggcattaatacattttttccactaaaatacttgtaaccatggccatcagtatgaagaaaaattttaaacacgatgaaaggtggaaacgtttcacctctaaatctgaaataaagataaaaatttagttatttggcatcaggttttgggctcagttgcttttcccccttatacttaagatagttcatatagtttcttgcatacagggtaaaggctatgtcagagcatgtaaagaactggtaatgaaatggatcacataggatgtaagacccacactttggtgtactcacaactattctcatacctgtgtaagactgaatacagaatgggagatgagagctactctcatggcaacttttagccacagagtcatgcctcggtttctttacataacaaatgtaaataagaataacacatttactttgtaattaagttctgagaagttacaagaatttaaaaaatccatatctaagatttcctcatattaactaagtacttcttgaaataaatcagcatagatacattacctgaatctaattttacactgcatagtaggatccttaataagcttagcctctaagggggccactttcttcagtatttcatgtgttacatagaattcctgaaataaaggacagtgctgtaaaaggaaagcagtatcccacccagacacaatttatggactataacagaggcaacgtggtaaagtgaacattatgctggacttggagttctgaaggggtgggtttttgttttggcacctccacttactatctgtgtagccttgagccagttacttaatcattttggcctccaactttggttatctgtcccttttagagatcaaaggcactattatttccctatgacagcacttttcacaatatattataattacttatcaacttgtctgtgcctcctactagactgtaagcttcatgaaggtagggatggtggcttttctctttaccactatattcctagcatctaatacagtgcctggaacacagcagatgcttaagaagtatttgttgaatgaatcactgtaagatgaggatgataatagtaataagttactagcttttaagcaccttttatgtaccatatactactatgttaggtgccttatatacattagctcatttaatccttacatcagcaacactatgagaattttttgtttgttttgagacagagtctcgctccgtcgcccaggctcgagtgcggtggcatgatctcggctcactgcaacctccgcctcccaggttcaagcgattctcctgcctcagcctcccgagtagctgggactacaggcacctgccaccacgcccggctaattttgtattttttcagtagagacggggtttcaccatattggccaggctggcctggaactcctgaccttgtgagccgcacgcctcagcctcccaaagtgctgggattacaggtgtgagccaccactcaggctgcagtgcaatggcatgatctcggctcaccgcaacctccacctcccaggttcaagtgattctcctgctcagcctcctgagtagctggaattacaggcatgcgccaccatgcctggctaattttgtatttttaatagagatggggtttcttcatgttggtcaggctggtctcgagctcccgacttcaggtgatccacccgcctcagcctcccaaagtgctgggattacaggcgtgagccactgcacctggcccattatgagaatattatcacgcctattttacagatgagaaggctgaggctcagggaatttttgtaatttataaaaaggcatacaggtagtgaatggggaagccaggattcatttagttctgtttgactctaaagtcccaactctttcccccaaacaaccccaaccaaccccgttatgcctatgataatcacataaaaatgtacactaaagagcttttaggctgggcactgcggctcacgcctataatcctggcactttgggaggccaaagcgggaggatcacctgaggtcaagagttcgagaccaacctggtcaacatggtgaaaccccatctctactaaaaatacaaaaattagccaggcgtgatggcaggcgcctgtagtccaagctatttgggaggctgaagcaggagaatcgcttgaacccgggaggcagaggttgcagggagccgagatcgtgccactgcactccagcctgggtgacagagcaagactctgctcaaaataaataaataaatagcttttaaaaggacaaagcattattaatttaaggtattaaagtattactataacagataaaaaagaatttccttctgttacaaaagtctaaaaatactatgaaaccagcattataaaattaaatacaagttccatattcaaagacaatggataatagacctgaaatgccaggagtttacctgggtgggttttctctgaagtattcagacggagtcttgctctgtcgcccaggctggagtgcagtggctcaaactcggctcactataacctccacctccccggttcaaggtagctgggattacaggcgcacaccaccatgcccggctaatttttttgtatttttaggagagacggggtattcaccatggtgaccggactggtctcgaactnnnnnnnnnnnnnnnnnnnnnnnnnnnnnnnnnnnnnnnnnnnnnnnnnnnnnnnnnnnnnnnnnnnnnnnnnnnnnnnnnnnnnnnnnnnnnnnnnnnnnnnnnnnnnnnnnnnnnnnnnnnnnnnnnnnnnnnnnnnnnnnnnnnnnnnnnnnnnnnnnnnnnnnnnnnnnnnnnnnnnnnnnnnnnnnnnnnnnnnnnnnnnnnnnnnnnnnnnnnnnnnnnnnnnnnnnnnnnnnnnnnnnnnnnnnnnnnnnnnnnnnnnnnnnnnnnnnnnnnnnnnnnnnnnnnnnnnnnnnnnnnnnnnnnnnnnnnnnnnnnnnnnnnnnnnnnnnnnnnnnnnnnnnnnnnnnnnnnnnnnnnnnnnnnnnnnnnnnnnnnnnnnnnnnnnnnnnnnnnnnnnnnnnnnnnnnnnnnnnnnnnnnnnnnnnnnnnnnnnnnnnnnnnnnnnnnnnnnnnnnnnnnnnnnnnnnnnnnnnnnnnnnnnnnnnnnnnnnnnnnnnnnnnnnnnnnnnnnnnnnnnnnnnnnnnnnnnnnnnnnnnnnnnnnnnnnnnnnnnnnnnnnnnnnnnnnnnnnnnnnnnnnnnnnnnnnnnnnnnnnnnnnnnnnnnnnnnnnnnnnnnnnnnnnnnnnnnnnnnnnnnnnnnnnnnnnnnnnnnnnnnnnnnnnnnnnnnnnnnnnnnnnnnnnnnnnnnnnnnnnnnnnnnnnnnnnnnnnnnnnnnnnnnnnnnnnnnnnnnnnnnnnnnnnnnnnnnnnnnnnnnnnnnnnnnnnnnnnnnnnnnnnnnnnnnnnnnnnnnnnnnnnnnnnnnnnnnnnnnnnnnnnnnnnnnnnnnnnnnnnnnnnnnnnnnnnnnnnnnnnnnnnnnnnnnnnnnnnnnnnnnnnnnnnnnnnnnnnnnnnnnnnnnnnnnnnnnnnnnnnnnnnnnnnnnnnnnnnnnnnnnnnnnnnnaaaaaaaaaattagctgggcatggcggcacgcacctgtagtcccagctactagggaggcggaggcaggataatcccttgaacctgggtggtggaggttgcagtgagccaagatcatgcccctgcactccagcctgggcaacagagtgagacttcatctcaaaaaagaaaagaaaaaaaagagtatcactaataata

SEQ ID NO: 1043 - DNA, 1191 bp, Homo sapiens
aaaaaatgtaagctgaaatgatgacgtgttcttttagaaggtttatcatagcaactactataggcagtgattctaagaagatgctattctttttttccattgctttgtctagttttttttttttaaatctgtttttgtgcctttgtaattctagggttattggtatagttctcaccatatcttgaatacagatgctttttcctttggaaataatttctcataaagcacattgcttatagctgcttcccttttcccagagtagtaaaagttgtgatacaagacagtgatatcagctgggcgtggtggcacacgcctgtaatcccagcacgttgggaggccaaggcaggcagatcacttgaggccaggagttcgagaccagcctggccaacatggtgaatccccgtctctactaaaaatacacacaaaaaattagctgggtgtggtggtttgtgcctgtagtcccagctactcgggaggctgaggcacgagaattgcttgaaccagggaggtggaggttgcagtaagctgagattgcaccactacactccagcctgggtgacagaacgagactctgtctcagaaaaaaaaaaaaagagacaatgatatgaaaaggtcttacatgaatgagttttacgcatgattcaatctgtaagtcctataaattatttttgatggatggtatctattttcttcctattagtagtttggggcaaaaataaatttaactgaatgtaaaaatattcagctctatggggagctgagaagaactaaatattttcagacacttgttatgtgcaggttgtttggcatatatttttaaaaatctttataataccattttgaattaaattctatccccatttaacaaatgaggaggtggtttctattcttaagtaactttcccaaaatcactcaattaagtggcaagggtgggatttaaatcgaagcctatactctttcacttgtttccaaagatgccaaactcaaaatgtggctaaacagtaaatcttgagcaaagaaatgatttactaggaagcagcacaatagaacatactggatgtaggaaatgttatatatcttgatctcattggtggtaacacaagtatatacatatgaaaaagttagttttatccttactgttagtactcagtgctcttattattcctcaaaaatgaaaaaaaaagtaaaaaa

SEQ ID NO: 1044 - DNA, 1192 bp, Homo sapiens
aaaaaatgtaagctgaaatgatgacgtgttcttttagaaggtttatcatagcaactactataggcagtgattctaagaagatgctattctttttttccattgcttggtctagtttttttttttaaaactctgttttggtgccttggtaattctagggttattggtatagttctcaccatatcttggatacagatgctttttcctttggaaataatttctcataaagcacattgcttatagctgcttcccttttcccagagtagtaaaagttgtgatacaagacagtgatatcagctgggcgtggtggcacacgcctgtaatcccagcacgttgggaggccaaggcaggcagatcacttgaggccaggagttcgagaccagcctggccaacatggtgaatccccgtctctactaaaaatacacacaaaaaattagctgggtgtggtggtttgtgcctgtagtcccagctactcgggaggctgaggcacgagaattgcttgaaccagggaggtggaggttgcagtaagctgagattgcaccactacactccagcctgggtgacagaacgagactctgtctcagaaaaaaaaaaaaagagacaatgatatgaaaaggtcttacatgaatgagttttacgcatgattcaatctgtaagtcctataaattatttttgatggatggtatctattttcttcctattagtagttttgggcaaaaataaatttaactgaatgtaaaaatattcagctctatggggagctgagaagaactaaatattttcagacacttgttatgtgcaggttgtttggcatatatttttaaaaatctttataataccattttgaattaaattctatccccatttaacaaatgaggaggtggtttctattcttaagtaactttcccaaaatcactcaattaagtggcaagggtgggatttaaatcgaagcctatactctttcacttgtttccaaagatgccaaactcaaaatgtggctaaacagtaaatcttgagcaaagaaatgatttactaggaagcagcacaatagaacatactggatgtaggaaatgttatatatcttgatctcattggtggtaacacaagtatatacatatgaaaaagttagttttatccttactgttagtactcagtgctcttattattcctcaaaaatgaaaaaaaaagtaaaaaa

SEQ ID NO: 1045 - DNA, 228 bp, Homo sapiens
tcgaggtcaggagattgagaccatcctggctaacatggtgaaaccccatctctactaaaaatacaaaaaaaattagccgggcgtggtggcgggagcctgtagtcccagctactcgggaggttgaggcaggagaatggcgtgaacctgggaggcggagcttgtagtgagccaagatcatgccactgcactccagcctgggcgacagagcgagactccgtctcaaaaaaa

SEQ ID NO: 1046 - DNA, 711 bp, Homo sapiens
aggagatgaaactagagatttgtgccaaattgtgaaaggccttgactgccttgcttcttgctaaacagtggaatttatcaacccactgagacaaagtcagttaagatttttgagccttccatatatttagctgcttatatttaatgtcttgtctttaaaaataacacgtatgacttgttgtttgcatgcttttgcatatataacttatttgaagttaggtgcttctactgattgactttgactttttgttcacaaaaatatagggatcttgatttatgactggaccacttaatgtattaatttgcactgtgttatatcctaaacttttaaaactactcatgactaatgtctttcaccaaactgttacctacgaactttctaaagaaatgtgtgacaaaggcgtgattagtttcatttgctctgccatttttagctgtatatgtgataaaacatgttttaatacatctctttttaacttcgattttatttggaatttttgaatgagctgtttgtttgtttttaagcaaagtaattggagtgaactttctttgattcccaggttttcttttttccccttttttctttttttattgcattggtagatgcagggcaagaaatttattactctaaatttgtgactcagaattttaaaactaaattaacttcataaatgcgctcacttttttcttaatgcattacgtctaaccccca

SEQ ID NO: 1047 - DNA, 374 bp, Homo sapiens
cctctctctacaagatggtataaaatttagtattattttaaagaaataatacctagcagcagtaacctggcagcccaaaggctgtatatggcccgtagatgtgtatatttatgtattttgtatcagcatttaaaactaggagattttgtattaaaatacaacatttagatttgttggaaaaatttaaaaagtctgacaaaactgtacctttatagtactcctttataggagtcagaggctggagtcaagtgttaactgtgttggacttgcttttcagtttgacagttcatggtatgccaacacctaggctgtttttcagttgccatttattatcatatgtgctctgctgcttttcttacgatagagaaacatgt

SEQ ID NO: 1048 - DNA, 710 bp, Homo sapiens
aggagatgaaactagagatttgtgccaaattgtgaaaggccttgactgccttgcttcttgctaaacagtggaatttatcaacccactgagacaaagtcagttaagatttttgagccttccatatatttagctgcttatatttaatgtcttgtctttaaaaataacacgtatgacttgttgtttgcatgcttttgcatatatacttatttgaagttaggtgcttctactgattgactttgactttttgttcacaaaaatatagggatcttgatttatgactggaccacttaatgtattaatttgcactgtgttatatcctaaacttttaaaactactcatgactaatgtctttcaccaaactgttacctacgaactttctaaagaaatgtgtgacaaaggcgtgattagtttcatttgctctgccatttttagctgtatatgtgataaaacatgttttaatacatctctttttaacttcgattttatttggaatttttgaatgagctgtttgtttgtttttaagcaaagtaattggagtgaactttctttgattcccaggttttcttttttccccttttttctttttttattgcattggtagatgcagggcaagaaatttattactctaaatttgtgactcagaattttaaaactaaattaacttcataaatgcgctcacttttttcttaatgcattacgtctaaccccca

SEQ ID NO: 1049 - DNA, 1972 bp, Homo sapiens
tcacccaacaatgtttttttcatgttgatcactttactaaagcgaacaattggggttttaccaaaattgtgaaggattttattcttccatacttatgtctgtgttcagggtcatacagattctactttttccttttagtttaaggtattctcttggagatttaatgtacttaaatttgaccacaatttattgagagcatattctgtgtcagacattgcactctgcactagatattcaggaatttctaaaaagaatgttaacattgctgttacatagtcagttactgatcacattcttttcctctcaacttttttcaaaataggaatctgcggtatgttttcacgtatggagttcaggtcaggcttaggggtccctgacaatgtgaatagttttaagctgggcctcaattcgtggtacccttatactaatttaacaagccgtggactctaggttccaccaaaaatattttgttccatcctctctggtttcagtccatggtgtacagaaagaaaactaaggaacttcagccccaaattgtcaaattttgctacttaagaaacagaagatttaaatctatcattttgtcttatattccagagttgactggttcctcctgtctttaacttcttgtccttgaagggtattctaattttcattcagaaatatgacttctcatagggtttgtgttagatattttcagggccagatggatatgatgttcccatttctgttttattgttaaactactattccttttgagctgtaatgaacaattcattctgagaggcaatatatgttttcagtaattgacttgaataaaagtaaatgttaaacatggagttactaagttaatacagtgggtattagtactaatttgttcaaattaagatagaattcttaatttgataaatagaattcttatattacagcatcagtccaattggattgatagtttgtagaaaggtaatttcttacatgaggaaagacaggttttctttctcttagcaaggtattaatgcaaaaatgacctcttcatttcctaccagcttccagaagggaaatgctggttaggaggtaaattcaatttactctacaagcaaacttcacatctgttatgctgaagtcagagtttatctttcttgttatgtggaacctagaaatataccatgaggaatactgaaaaataaactagcagaaattttgcgtgatgctgaggatttttagatggctgcaaaatgggtgaaagtaatataaacttaacaaagaatgttgtcacaactctctggaacttagtactgtttttcaactaacaaatggaagatttgtgagactaggtcgacttaatgtgatttcaatgcagtaattactgtgtggcatgggcatggtaagagataggccttttctagaaatattctcatctctgttttttttagttgctcttacttagatttatattaactcagcttcacattttcatttctttttattttattttaaacaatgagaaaaatactccacgatgtcactgatttagttatcagatttgctttatttctgtatataataggtaatgtgagtacaggaaatatatctgaaaaggttacttgtacctaaattttaagttagatcatttaaaaattacttataagtctcttgagtgttttatatagtagggcagatggaaaaacttatttgatattcatttttggtacctcttaggaaaataattgggaatgtattcagttggaaaaaatgttgagaagagtgttttatataatgattatttagtaaaacattaaaaataatttcttattctggaggtttatagacatcaaaattgacaaagattcatggattatacatttcatcaaggtacctttaagcgattttttaaaaaaaattctgactctaacaatgcatgctcattgtagagcgttaaaaatacaaaaacatgcaaaagaaaaaattaaaa

SEQ ID NO: 1050 - DNA, 105 bp, Homo sapiens
ttttttgtatttttagtaaagacggggtttcaccatgttagccaggctggtcttgatctcctgtcctcgtgatcctcccgccttggcctcccaaagtgctgggat

SEQ ID NO: 1051 - DNA, 4400 bp, Homo sapiens
gggaccccaggcttcctttgagacatccaccagcggtgatgggttgggaccaatctcccccactcctctccaccctagcagtaaggtccccgctctcgatactgccccagcacctgcactggccctctctgatttcccaactccagcccattccaagtgctgaaggcgggtcgctaggtgctgggacctgggcgcggggcaagaccttgggctgtgtggggtgcaggctggtttactgggttcacgattgagggagtggtctgggggttaggtgtagggccaggctgcgttgtgctctaaggggcaggcggcaggcggtttgggggggctgtggtcagacagggtggggtggcggtgggtttggggaagccgcagcagcccgccttggggtcccgcgagtgccgagggagctgccggggcatggtggcgcggggcccgtggtcctgcccggcacgacccccgccccgcagcgccccgcagcgccccgcccccgcggccccgctcgcgacgcgtctcccgcggcgccccgcccccgcccgcagtgcccggatgcgggtgacgcgcggccgccatctttccgtcccgggcagccagcgccagtcggagccagcgcgagccgccgccgccatcactgccgctgccaagtcctccacccgctgcccccgccatgtgagtcggccgcccgccaccctcaccgcgcttccctgcgccggccgccgcccttggcaaccggccgtcgggagtgcccggggtctctcctgcgttccccgcgccccggggccaggcccaagccggtgactgcgcgcgggcggccgaggagccccgcgtcccgggctggccggctcgggcgatggccgcgggaaggagcggacccagtgtcctcctgcccctccccgcccctgtcaccgcggccgcctgtcttttcgggtcgacccggatcgcatctgtgaggtcgccctcagttgacaggcggggaaactgaggccgggggggcctcgctcaaggtcacgcagctcatcggcggcagggctggaccgagaccagggcttacatcgggtggccttcctcccgaaaaggaggactggagggacgaggatggacaggtggatgggcggagccctggctgcggggccgggaggctgcaggccctgggtcttaatccgtccctgctcctcaggtctgctaccgctgccacggccccccctgctgccccggctggggagggtggtccccctgcaccccctccaaacctcaccagtaacaggagactgcagcagacccaggcccaggtggatgaggtgagtgtggggggagtcaaaagcagtaggagggaccctgggggttggcgtataggtgtaggggcccatgttggtttgggagtgatgacagttcacgcctgtgggtttgcggacaaagataccatgccccatccctgtctccctgtcagcacgcacttggaagggcgctgggggtgttaatcagctttgctagcctggggtgtgccagcctgggcaggtgtgctctggtgatggacagagcgcctgaggttccatagagggagggtgttgctatgacatctgagatgtcaccagcatgcccctgatgtgtgctccttgcatgtccccaggtgtgctaggcatgttctgtgtgtccttggcatgttaacctggcagtatcagggtgcatgttccatgtgtggcacggtgggcacatgtttgaggattgccctcactgaggtgggccttggcacacccccctgcctcgtgggcccttctcccaggtggtggacatcatgagggtgaacgtggacaaggtcctggagcgagaccagaagctgtcggagctggacgaccgtgcagatgcactccaggcgggggcctcccagtttgaaacaagcgcagccaagctcaagcgcaaatactggtggaaaaacctcaaggtaagggtggggacaggaaggaggacaggtgggtgaatggggtatcatagtttgtcttactgatcctcgcctctcacccccagatgatgatcatcttgggagtgatttgcgccatcatcctcatcatcatcataggtgagtagggtgagaatggccggggccctttccctggagaggtttccccagtggattctaggttttgaaggtcattaatctagtttttactcttcagccaaaaacacatatagctgctaatggcaattctgattcatctagagccaaaaactttgatgttatttagcctgcattttgcctagttcttggcagtcttgttaacatttggaaataggaaagctggtgtatccattgaggaccctttaggcctaagagcccagtctgagaaccctggaattgaggagtgggagaaaggaaaggaccaggggcttgagacatgaccaggaagccaaccaccccattatttgagagcttgcggtctcagaggctcagaggattagggtctgtggcttcaaggccataccatggagcggaagggacctcagaacctacctgtctagccccttgctttgtagatggaaaaactgagtccaagagagggtgtcagccagctggggagtggggaggattggagcagggccaggcctgacacactgctttcttgttctctctctttctctcccctctccctcttcctcatcttcttcccctctctccacagtttacttcagcacttaaatccccgaggagtctgccctgcctagagaagggcctctcccccaaccctcagccgttcctccacctctcagccatatctttcagcccccactcccctggatccgtgtgtgtgtgtgtccgtgtgtgtgtccccctgtaaatagccagctgttatttatacatatataatattatatatatttggtctgtttgtagttttattactagatgatttttccggttgtccttaacaccccttcctgaggttcccttcacccctctctcttgccttccttccctttccctttcttcctgactagccccaagtcccttcatttgcatctgctatgcaatagtccctctcctttccttcttcttccctcagatttagctgatccttcctcccaccctggccttcctttcctctttcctcctcactctccccgtcatgctccctctgccccgccctcaaaaaaaaaaaaaaaaaaaaaaaaacaacagcacctgtccaggcttccttaggtacatcttctttgtatccattgggaggctctgagactggccccacttggtcctaagaatcccaaggtctttgggagcgtccagcatgttaattagcgtatcattacatactgctatccctttccatttctttttgttccatcactcttctctcaacctgtgtttctttttttactgaggagttagtccccattagttcttgtatcacattttcatttgcacgacattactcgcaggtggtggggagcctgggcttttggggaaccaggctgctctggtccccagcattgcctcctcctagcccctctagtccagtttgcctcccttaccctcattttccaaacctcttgtaccctcctctccctcccccagctggtatgtaagtgtcttgaagttcagtatgttatgatggaccaataattctgccacttcgggtttctccctacattcctgctccccagttttcatgtggggtactcaactgacattcccatggggtttccctcccatctgcctgatccacctcctcctcccaccaggagagttgggggttggccacaattgatctcttgtgagaggggtggctaccagtgtgtgtgtgggggtcatcactgccttggggaggagtggggcagggcagagaatccccccaattcctgcctgaaatctctggcctcacccctgctgggggttggactgaaaaccctcctccccaatttggggggtgttgccccatcactgcccagctcctctgactgccccccctgaatttagggtgggggtactagtcactgccaatgtgtgtatgggacttgctggaaaacggggatgcttgcccctctccaggactattgagcccagagagagctgtcctctcattgggtgaactgattgaggaagggtctattgtctttttaaatggcacaattttaagggtttgagggtacagtcccttaacctgccacgggagggggcccccaaactttcttccccccacacttctggttttctgtgtggagggggagcagggatatctaagctgtggtgtgaaagggtaggagagatgctggaggtgggggtgctgtgttttagaccccccatattatcccagtgtcccctgcccccctcttcccccaccccatgcccccaattctgtggcgcatccagattgtgaaaatgtacaataaatgtgtaatgagtaaccagg

SEQ ID NO: 1052 - DNA, 463 bp, Homo sapiens
gtctaagatcttttttatttttctattttttttttttggttgggggagaataagatcttttcttaaccaatgggaataatattggatcggaaggtataccaggaaggttgagaagatacattggtaatggactggactttgcaagaggccctgaccttgggcagggcaaagtgtgattctcaaagtggccacaggggggcactaggagttggtaatgggaagtgtcatagccagcccgtgtctctaagcccggtgcgccctgtggtctagggttcccagctttcgtttccctttactggggcatgttcctgctgttggactcctttctactcctcgatttaacttctagacgctctgccgtggctcccgtgcagcagtagatgaagtagttggccatttctgtgaagcatgtcttcccctctgtgcctaacccagtgccagcgcccagatggggttagtaaat

SEQ ID NO: 1053 - DNA, 359 bp, Homo sapiens
ccgggactgtcagtgcacaaggaccagggacgcggctgctcctctgagggggaggaagccaagagtatcttctcttagattgggctgagttcccacacccagcacacacattccctgctcactcacctcccacagacagctgggaaatgacacctctggtgacagagccactctccgggcttctgtggggagcgggtggggcactgcagtgggggaggatctcacacccggaggccctgggaagccagggtgggggagggaggaagctggttcctgtttgtcttagagatcaaggccatcagcctccctgcaccttccagggatgtagtaagcacccccaccccagggccaaagggcct

SEQ ID NO: 1054 - DNA, 16146 bp, Homo sapiens
gtgtggcgtcacttccggcttccttcagtccgctggtcccgagcacgagctgtgaggggattcacttgtgtgcggaactcctcggaaccatggtgagcctgactcccctgcctattgccctacccctgctccgccgtgctcttgccaccccactgcttcctctgtcctgctagggacgtaggctccgtttttgtctccccggccctccgcacatggtgcgagccatgcgcggggcgtgcggcctgcgccaggccagccggtggagctcaccacgagggggaggggtggaccgcaaagccagcgtctccttgtgcctaggtctttgcatagtcccggcagcccaggtccgcgcctcacccggagcgaagaaatttctagtgtgggacccgctccgccctccttctaggggcggagcctggagcgacggggtctgagccatcagagggtggaggggccgcagccttccgagggtggaagatggaggccgcgttccctcgcccgcccggcaggcgtcaccttgatggcctgcaacccctccctgcctcattcttagttcaagatcgtctttagtctcgctgtacgtaactgtcaatctcgctggtgtataatttatactcccgggggccttgtaaatccgaaaagccatgtcgctctcctacaagtccctctctcccacttaaatgctttctccgatgatggaagcttcatttgattgaaaacattgttgtaaatgagttttctcttagatgtccacttgtaagactagtggaaggcacctcagtgtatgtgttagagtattggtacttaaacggaatgcctcttggttttccttttcaggcgtccctttcccttgcacctgttaacatctttaaggcaggagctgatgaagagagagcagagacagctcgtctggtaagccttgttctaagcattgttttaaagataaaactggaggccaggcgcggtggcttactcctgtaatcccagtactttgggaggccgaggtaggcggatgaactgaggtcaggagttcgagaccagcctggccaacatggtaaaaccccgtttctactagaaatacaaaaattagccgggcgtggtgatgggcacctgtaatcccagctactcgggaggctgaggcaggaggatcgcttgaacccaggaggcggaggttgcagtgagctgagatcgcgccattgcactccagcctgggcgacagagcgacactctgcctcaaaaaaaaaaaaaagtaaataaagataaaactgtacttgaagactgtaaagttgattctgataatctccttggtttttactccagacttcttttattggtgccatcgccattggagacttggtaaagagcaccttgggacccaaaggcatggtaagaaaaatagaaaagttttatattttaatattgttttagagcgcttggtggaaatataataacaagcgtattaaaatgctttttaatctttaaaacgtttaattataaaagacaagtatgttctccttagtaaaaatcagagtccccagaatcaccatccccaatcccatgcccctccccaatgacaagtactgttatcatttgcacgtacatcttctaatattctgtttatgtagaagtatgtgtacttcattatgtattttatactcatgtaacatactgttttataaaacagatactatttatcaatacttttttgtagcttgctcttttaaattcctttcagtgtaagtagataacactgcccctttaactgtcaaatattatcctgtaccttaattattttataatttaattatggctgtattgatagtttctttccattgtttttgcagttacggtgttgaaacaaaaactagtgtctacctgtgcttctagtgtttctaggggtagatacatggtttggttacgtggtgtatgtattgaaaacatttgatgaatggataccacaaaatagctatccagagtgtttatacactagcactgtgtgagaatactgattgatccatgcattcttcaagatgtgcttatgtcttaacttgaaccaattatgttccctttaggacaaaattcttctaagcagtggacgagatgcctctcttatggtaaccaatgatggtgccactattctaaaaaacattggtgttgacaatccagcagctaaagttttagttggtaagtctgaatatactttttcaccaacctaataatactgtttgttaacatttttgaaataactttataaataggctgtgttgaccaatcgtactgtcaattgatgtccactagttgttaattatcgttgttaaaatacaagcttcaggagtgcccgtatgttggtggtaaaactgttgcatttcagacctcagagttccaaataatttgttgaatgaggaaccctggtaagtttagattggtagtgaatatttttggagaatttagtaagcaaagaagcaattttgagttaataactaatttctttttctagatatgtcaagggttcaagatgatgaagttggtgatggcactacctctgttaccgttttagcagcagaattattaagggtaagagcaactaagcaactcttttttcctactgtgtttttgagtatcagaggtaatctagtccttacttcctctgtctttactattgaggagtgcttaataattttctatttataacttttgttttataactttattaataggaagcagaatctttaattgcaaaaaagattcatccacagaccatcatagcgggttggagagaagccacgaaggctgcaagagaggcgctgttgagttctgcagttgatcatgggtttgtatagcaaagtactactgttctaaacatttagtgttctttcataacatgcttaatgcaagaaatctataggacactgaaaagcatacacaaagatcatcttgctgcctcaccccactccaacagtcaaacctacatcagcctccagagatagccactaaagttaagtttgggtttttagtctttttgtatatatcatcaaaatatacaaataaagcaaatagtataatactgtatagagaatttgttagcctctttttaacctagttaaatattaagcacatttttggatgtcaattttctgtgcagtattttaatagagttacacatttgaatatttggctagaatgactgtattaacctatctgtagggggagatttgtgtatttgatgatttttagcattataaaataactttgtgacgttgcgacatagcccaaaggtttctagaagtgtaattgttgggtccaaaggtaagtgtgtgtgttttaaggcacccccaaacctgggctgcacagcaggtgagcagcaggtggaaaaattgtcttcccatgaaaccagtccctggtgccaaaaaggtccgggaccactgttttaaggcacttctatttatttgcccattcacaactgtataataatacttgtttttcacgtccttttatttatttatttattttgagacggagtctcgctcttagagttgcccagaatggagtgcagtggcacgacttcggctgactgcaacctctgcctcccgggttcaagcgattctcttgcctcagcctcccaagtagcagggactacaggcatgtgccatcatagccagctaattttgtatttttagtgtagatggggtttcaccatgttgctcaggctggtcttgaactgacctcaagtgatccatcctcctcagtctcccaaagtgctaggattacaggcgtgagccactgtgcccggccatttctcacattcttgccaacattagacttttgcatgcttgtgtggcccccacccctcttttttttttggcattttgccagtttggtggggaaaataacatctttaatttgtgtttcttgattactgctgaggtttaattcttttcatatagcttacagacttgatcagttagggtaaaattatctattgacatgaatatctagataaattttgaaaagtaaagtagggttaatatgtatatttggttggttttatttagttccgatgaagttaaattccgtcaagatttaatgaatattgcgggcacaacattatcctcaaaacttcttactcatcacaaagaccactttacaaagttagctgtagaagcagttctcagactgaaaggctctggcaacctggaggcaattcatattatcaagaagctaggaggaagtttggcagattcctatttagatgaaggtatgtatgaatgtcagatacaagaagctttgattagatgctgagggctgaatactgagtgaattctgttttgagaccagtgaccctttacaaagccagtgaacttgaatttaaggacatatcatatgtgcaaccatttttgtcattttattgacagtgtactcctcttcccgcgctattccagcattgttgatgatctctagagtttacttaactaccatgaagttatttgcagtctctgataaagaggaaatgttttcttttactagaaatcatctattctcaaatggtacttttaccaggattatatgtattctccaggaagggtctgggtcagtcaaatcattgtgttagctggttgttgaggatgtacagttgaccattgaacaacatgggtttgaattatgtaggttcacaatgcaggttttttcaataaatatagtcagccctttgtgtccgtggtttgcacatgtgcaaccgaacgtggatggaaaatgcagtatttgcaggatttgaaacccatgtatatagtgggccagcttttcaaatctgctggttccagtcagcctggaacttaagtatgtggggattttggtgtatgtgggcgtcttggaaccagtccccttcgtatactgggggatgactagttttttttagaaaagaattaaaaaaaatttctttaacaaataattatgtatgtttatagggcaagaggatctagttcttaaagagtgataaatgagacataataagtactgctttcttagtagtacatttttgtttagagtgaagttttccagatcatcttcacattatatttacttcacaaaatggcctgtcaaaaagtataggcattcttatatagagaaggaaaaaaaaagaattagatggtgctttacaacttctgtttttaccagtggtttggagtcctggttttgttctgtgtcataggtcttgatttattttaagagagagtcataattctgaaaatactcttgattaagtttatatacaagagctgtgtagcatttctttttttttttttttgagacggagtctggctgtgtcacccaggctggagtgcagcagtatgatctcgcctcactgcaaccactgcctcctgagttaaggcgattctcctgcctcagcctcctgagtaggtgggattacaggcgtgtgccaccatgcctggctaacttttttgtatttttagtagagacggggtatcgccatgttgaccaggctggtctcgaactcctgacctaaggggatccacctgcctcagcctcccaaagtactgggattacaggcgtgagccaccatgcctggccgctgcgtagcatttctgataggggctggtggtagggaaggagcattaaaacaagaatattagtagcacaagcagcaccattcttgaatgtctgctctgtactaggaattgtaataggaactttagtcatttagtcatcatgacctggtgagtgaggattaggttcacttgaatagagtagaaaacccaagataatggtggcttcataatggaaaagtttctaatgtaaccaaaaaaaggcctagaaaggtaggtggtactgggtttgtatgatggttccaaagcagcaggactaggctggtaactagcacctctgctactggttacattcctgttttacaaattagcatttctggttggataatttgtcgaaggttatatagccagcagcaggggcatgatcagggtcagatttatctgactccacggtgtccatggtttttccatttttaccaccagcctcaatacctgaatcttcaatttttctcttgtggtggtgattttaagctaataaaaatataggacttaacctattgtctttatattgcaacccatacagatgtgggtgtagcgtatatctgaaacaaaagtttcaaaatactgtttaattttattgtctgtactgtgctcttatattttctgtttcatattttttaagtaacccattaaattgattttgtaataactcttctagtgggatgctttataccagaagtgtccaaggaagagaatacagtcatgggttcctagtttctgtttctggttgggtcggtaaagccccttcctcctccctcttttctgcttatcactagagacagaaactaaaatccatggctttcaggcgctaaaagcctaaaagcaaaacaacaacagaataaggcaggttggacaagcttgcttttatgccttctaagagcttggtaaattggacttaaatagcttctttgaaacagtgatatgataaagcagacagctttttataagatttactaaggctgctttgaagtattaaatatgatactgttcttatatttattgtaggcttcctgttggataaaaaaattggagtaaatcaaccaaaacgaattgaaaatgctaaaattcttattgcaaatactggtatggatacagacaaaataaaggtatgtaactctactttttaaaaattaaaattactgcccaggcagagtggctcatgcctgtaatcctagcaatttgggaggccaaggtggtggatcatctgagatcagaagtttgagaccagcctgaccaacatggagaaaccctgtctctactaaaaaaaaaaaaatacaaaattagctgggcatggtggcgcatgcctgtaatcccagctattcgggaggctgaggcaggagaatcacttgaacccaggaggcggaggttgcactgagccgagattgtgctactgcactcgagcctgggcaacaagagtgaaactccgtctcaaaagtctcaaaaaaaaaaaaattgctggattctataaactcaggaatcaattgcactaaaaagcttggaataggtatgaatctattgtgtatatacacatatatatacgttggtaaaaatgttgaaatatgctatgggactctttaaaaagagtaatgaggcctggcgtggtggttcacgcctgtaatcccagtactttgggaggccaggcgggcggatcacaaggtcaggagttcaaggccagactgaccaatgtgagatggtgaaaccctgtctttactaaaaatacaaaaattagctgggtgtggtggcgcacacctgtaatcccagctgcttggaaggctgaggcaggagaatcacttgaacccagcgggtggaggttgcagtgagccgagattgccccactgcactccagcctgggcaacagagcgagactcaatctcaaaaaaaataatgaaactgatgctctctttatgcttcgtttgtcttagatatttggttcccgggtaagagttgactctacagcaaaggttgcagaaatagaacatgcggaaaaggaaaaaatgaaggagaaagttgaacgtattcttaagcatggaataaattgctttattaacaggtctgtgtttgcttttaagaaaggatttttttccatgaaagtttatggaatacttcatatttacttatattgaattagattttttacctaggaactgtcttagataacttcacttaaattatggatttttgtaatcagtaaattgtgatttatgcacacttacagtgaccagaattacgggattgatttatacagttactataataaagaacacttcttttcatactagtaatggatgcattagtactatagttgataaactctaattatataggtaagaaatgcaatcttgttctaatttgcatttcttttacttgtggtaaaaatgtttacatgttttttagtctaatgtagtttatcttgtaacagttgtgagcataatgttttcatgtaaaatatttacaggcaattaatttataattatcctgaacagctctttggtgctgctggtgtcatggctattgagcatgcagattttgcaggtgtggaacgcctagctcttgtcacaggtatggaaaaaaggtattgttttctaacaaacacaatagtcactcttgaatttgttatttgttactatatgcaactacctttaaggagtttagaatttcagcagttattctgaaatctattctcttggatacctttaatttagatacatagatacattacatttacgataccaagttatataccacatttgccgtaggtatagatttctttcattgtgtcactgttttaaaggtagatttttggccaggtgcagtggcttgtgcctgtaatcccagcactttgggaggccgaggcagccagatcgcttgagctcaggagtttcagaccaactttggcaacattgcgaacccacatccctacaaaaaaaaaaaattggccaggtgtggtggcaagcgcctgtgatcctagccacttggggggaggctgagggaagagaatcgcttgagcctgggaggcagaggttgcagtcagcggagatcgtgccactgcgctccagccttggcgacacagtgagaccctgtctcaaaaaaaaaaaaagatatgtatatttttttctcacaaacctgtaagaccgttgttaaaatctgaacaaactagagctttaaaaagtcttaagtctacttacatttatctagttcgtacatttgtttttattgcttagtaagtagttgaatgctttgtgtcctttgtagtagtacagttacaatagtaacctttattgaacatttactgtgtgctggagagtgggtcaagtactgaaacattgcttttgttaattttaaaaaatttctgaaagtaataaacgttagcatacgtgaaacaatcaacattgtataatgaaaattagtatacctcaataccctttaatagaagtatgagtgatataattccagttgtgtcaaatagaaattgtgtttataaatcagacatgtctgtctacatcacaatgacatgagttcaggctggttgcggtggctcatgcttgtaatcccagtgctttgagaggccaaggcaggaagattgcttgaagccaggagttcaagaccagcctgggcaatatagtaagactgtctctacaaaaaattagctgggcgtggtggcacatgcctgtagtcctagctacttgggaggttgaggcaggagatctcttcagcccaggagtccaaggctacagtgagctgtgatcacgtcactgcagtccatcctaagtgacagagcaagaccctgtctttaaaaaaaaaaaaaaaaatgcagcttgtttgctttttattgtggtaatggtttaaaaattattgtttattaaatttttacagatttagggatataagtatagttttgttaatggttttcatagtacactctaagccctggaaaataagtttaacacttttctagattttaggtccttgaaaatgaatgaataggttggaaagttggtttgggaatgagaattaaggagacctgggttatgagttgtgaagtcagtagggctgtcacactgtttggaactgccatgaatattagaagaaattatagtgtactaacctttggagagtggacttggtctcatcccagaatgatctcttaagacgttttttttaatcatttgagaagcatagtcgtcttctaaccaagagacattttcctttaattacttgaagtgggtttacttgctttaaagttacttaggagccattgcgtacttgatgctttaaggtgacaaataaacacaatttaagatgctcatgtttatgtaattcattctttagttccacaaaataaagatgtaagaggccgggtgtggtggctcacgcctttaatcccagcactttaggaaggcctaagtgggcagatcacaaggtctggagtttgagaccagcctggtcaatatggtgaaaccctgtctctactaaaaataaaaaaattagccaggcgtggtggtgggtgcctgtagtcgcagctactcgggaggctgaggcaggagaatcacttgaacccgggaggtggaggttgcagtgagctgagattggcgccactgcactccagcctgggtgacagagcgagactccgtctcaaaaaaaaaaaaaaaaaaagatgtaagaagtaaatggtaataatatattgatgggataaacatatcgtaaggtcttgacatgaaattgctctatacccagaagaatgtttattaagtacaccaactgtatgtctatgaaggtgaccacatggtggctcccatccttaaaagctcagtggttgtcaaaggtgtatgatgacattggttcttgcaagtgtcattaaataaatgtcttgcactgggcatggtggcatgtgccagcagtttgatctattcaagaggctgaggcagaaagattgcttgtgcccaggaggttgtgctatgatggtgcctggtgaatagtcattgcgctccagtctaggcaaggtagcaagacactctctctttaaaaagaaagaaaagtctcatgtagaaggatgaagtgaaaagtttcataagccaagttagtcttatttttggatatgacgtcccaaatatctgttgtgtctcacatctagaacacaaagcagtctcagaattttgccagccaaaagtaaaaagaactttatacaaattatgagtataaattagtagtttcaaagaccagagtctttatgaatttattataaaataaataatagagcattgacagatttatcagtaaggcataggaaaagaagggttgattgataatatatgcaattcacattatgaaaggagtagtcagctagagaaaaggattttgaaatggaaacctgacttttgcttagttaggaaatagggaacgaagtggctgacctgttcagtttacagcatggaagatggagggaaaataggaatagaaatgagacataaggactaaattaatttgttcttattaaatttggtctgggaaattcttagtatgcatttcttgtttttttaggccttaggacatttcatttgtgataattagagatatcaggtgcttattaagcagttcatgaagtgtatagtggttgacttataggacaaatattttcatgtcttgtgctgggaattgtatcatgaggtcttagtcttataggttggattcagaagagaatctgaatttaaactcaaaagtaactgctttaagactcagtttaaccttgggaaggtagtattgtatagtgtgtgcttataggtctgaagccagactgcttgagtttgaaccccagctttttatattcatcctagttaggtctttggataggaaggtaaacctcttggcctcatttttatcatgtgtaaaatgggataataatggagcctatccaagaggattattttaaagattaaataattagtcgatatgaagtatttaaaaagagtgccaggaatataatcagcaatcaatttttaaaatgtgaaacacattacctatcattatctatccattactgcttattagaaaacaggaattttaagcctgctgtgcatttaactaatacatgtttatgtttataggtggtgaaattgcctctacctttgatcacccagaactggtgaagcttggaagttgcaaacttatcgaggaagtcatgattggagaagacaaactcattcacttttctggggttgcccttggtgagtgattatgtagatcctggttagggtgtctaaattcttgctaggctctgttgaagtaaaggttattgtagttactagaatagcatatcttacaagtcttaactcttcagaagcatgatacatactttgtttcagtctcttgagtcaacctcatatttaccgtgtctttgtgaacagtgcatgttcaacagttttttttccttgataacttagaaccattatgagccttgattgttggagaatgtataatacaggaagacaggtcagctttcagaacccagtaatataaccaacaccggcataaataatagaaggcaaactttttatccctaagtggtcactgtgtcttttaattttaggtgaggcttgtaccattgttttgcgtggtgccactcaacaaattttagatgaagcagaaagatcattgcatgatgctctttgtgttcttgcgcaaactgtaaaggactctagaacagtttatggaggaggtaagcatttagaaaatgttgaatatatttttaatttcttaaagtacaatataagtcataagtggttttaatggttcttacagaaatcttatattgcttttgcactaaattttaaaatgcttggcatatcttaaagtcagtaattcagtatcttggagacaactaagcattgcaatattttattggaattttaatctttaggctgttctgagatgttgatggctcatgctgtgacacagcttgccaatagaacaccaggcaaagaagctgttgcaatggagtcttatgctaaagcactgagaatggtaagttaatcaaaatgagagatccgaacttaagttttgtggttattgatagttttaaaatgagtagaaaatgaactggttaatactgcttttaaatttgattctggagtttctcctcttcgtgagcagtaactgaagcagattttacattgttcctaaatgtataattttaaaaagctatcctagttaggagtaaatcagtggttcttacagtagagtgagtagttacttgttttcttcattttcatagttgccaaccatcatagctgacaatgcaggctatgacagtgcagacctggtggcacagctcagggctgctcacagtgaaggcaataccactgctggattgggtaagcaatcaaggggaactttgtggccgttgttaaaagtaactcttttcactaagctttttttttcttttggaacataaagagttacaataaccgtataaaagactcttttggactttgtcctcataatcattacatgtgctgggaaaatgtgtgtgactttatatgctcagcatttcccaaactttgttattccataagacatgtaaaactggttagaagatttgtaactatttggtatataacgactataggatttaaatataaacaatacttacattctgaaaaataacataaactattatgttgtttatacaatcagtattaacttctaatttcatagtaaacttactgcaagataatcttgagtacagatcacagatctctagtccatagataaaagtggccaatgaggcagatttaattcatattgaaaaactttctgacaagctgtgctggacattatagagtagtcttaagaaggtagataatcctgtcattgaacaagagggagcaccagttaatctgtgagaaaatgaagcaggattctcacaagaagagaagttgggtaggtaacttatgaattttcttccatttgttttttattatttgatatgttgtcttctattaatatgggtgatcagtagttgacattattgttgttattactattattataactgacacaatggtcttgctctgttccccaggctggagtgcagtggcaccatgataattcactgcagccttgaacccctggctcaagcagttctccttcctcagccttccaagtagttagggctaaaggcatgtgccacaatgcctgactaaattatttttattttcttagagatgggggggcagtctcactatgttgttcaggctggcctcaagcaatcctcctgcctcagcctcccaaagtgctaggattataggtgtgagccactgatcctggccccttttattttatttatttattttttgagatagagtttcactgttgttactcaggctggagtgcagaggcatgatctcagctcactgccacctctgcctcctgggttcaagtgattatcctgcctcagcctcctgagtagctgggattacaggtgcccaccaccatgcccggctaattttttatatttttagtagacggggtttcaccatgtttgccaggctggtctccaactcctgaccttaggtgatctacctgcctcagcctcccaaagtgctgggagtacagatgtgagccgctgcacccggccccttttaatttttttaaaggctttctttgagctcatttgtaggcttatctacctactgagtaaagtagttgggtgtcctaattttattaataggattaatttttattataaatcattagagatgttttgatactttagttaaaactgctttttagtaaatttgtttttctttgcagatatgagggaaggcaccattggagatatggctatcctgggtataacagaaagttttcaagtgaagcgacaggttcttctgagtgcagctgaagcagcagaggtgattctgcgtgtggacaacatcatcaaagcggcacccaggtaccctaacacttttctcagaaaaaattactaacagcaaaacaaaatagggagctgtatttattttataattagagttaatgaaaagcagagacagttttgcctggataaaagtatgtaagttatttaaaatatcacaactcttaacacttaagccagaaaaacttaaggggaaagagggatgggcagctgaggtagctcttaggattgaaaaggcacagaaagagccatgcttggaaaggtcaagtactgaggacagtagatgctgtgatgctttctattgtctttaaacagaatgatagcaaaaggaaactgagttctgtaactaaagtgttctagggcaaggtcatatagccacacctactcccagaaatcttcacaagaagtcagtgccctcacccacagttgaaataacgcttaaaaaatgtataataccttgtttggtctgatactgttttagagatcaggtatcttttattagcaaattctgagtaatttgcaataaagaaactgaattttaactcagccttccagacctaccagaccatgggcttctttttcatattccttattaatctccagaagactttttttttcagatcagtgccctgtgacagctgcttcataactcttgacaatggttagcatcctagtccccccataagctaccaagggtgaaaagtttatctctctatatgatccctgtataatgctgtactctttgatctgttcttaagcttcttcagcttctcgtaactgttgtgtttgcctctaaaagcagtgtttctcaagctttagatccttgaacaagcattaagtacaaatttactagtacccttatcccatctttccaaaagattgttctatgcccccttattgtatggtcatcaaagaataaaagatgagaatagaaggtgcttcttgttggtgggggtgtctgcagagtcccaaggcagaacagtcctgatgtggtgcagggcatcacacagaggagggggctgagtggctagctcaggtctgtcttcctcctcacctaaagccagcagtcccatcctatataacccattagtccatgacataacttggtcacctcttaaaagcccaacttccaatactgccacattggggattcagtttcaatgtgagtgttataggggacacacatgcaaaccattgcagagttataacagttttaatacaggattctagttgtgtttgtatttagtataatactttggataaaatcatgctcttcatttttcactattgacttttttcttactctcataggaaacgtgtccctgatcaccacccctgttaagcattcccacgtgctgtcgatctttggaccagtttctagcaaagttgtgtttgaaagatactctattaaagaagactgtggaatctgtttatcggtgcccattatatccttaagtttggatatttagctgaccttcgctttaacataggtctaatttatttgccgtgtcattttccatacaaatcagttgatttaaaaaagttcatttctcatactgtgcattaaaataaaaatttgaacaattacttggttct

SEQ ID NO: 1055 - DNA, 100 bp, Homo sapiens
ggtggatcacttgaggtcaggagttcaagaccagcctgggcaacatggtgaaaccccatctctactaaaaatacaaaaattagctgggcatagtggtggg

SEQ ID NO: 1056 - DNA, 1744 bp, Homo sapiens
attcaaggctcactccagtccacgtttctagcttccgtcttccctcccctgcacatactactgcatgtacctccacagtcttcccttttgctttgctggcatctcatgtctttgttgcctatccaagctccctgttgaaattctatccatacttataattaacatgtcccttgattcatacagactttatcagcctgcccttagtttctgtcagacagaattaagtcctctgttcccatataaagcagatctttatagctgttttagtagatattgtttatatatctctctctttcacagccccttgtaacccatctcattcccatattctctttcaacccccatctctgattacagatagaaagggtgataagtttgtgggctgtgtctctttaatcttgtacctccacagcatctaggacagtgtcttgcctaaagcaaggatggaattaacatttgttaatagacgcttatctgtcagtcttactatcctcaccctgcttcataaggaaattatattttatttatattttatttcaaatcagtaatactgcctgtcacatcactaaaacctcaaaaaacagaaatgtttgaaataagaattttcaggtttgccttgtgataactgtatactaactagttgaaagtatggattcagtatcttcaaagtgttctgatttgctaggactcactgttttcttgtgtttaatcttcagtttgtgaggtcatttaatttgtagcatttgcaaatgttatactgaaaaactctgagaatgaaataagtcactatactacgtatttttataaataaggaagtgcacaattatgtgacttcacatttcttgcttgcttgctttttttggggtggggacagagtgttgctctgtcacccaggctcgagtgtggggtggtgtgatctctgctcactgcaacctcctattcccaggctccagtgatccttctgcctcagctgggactacaggtatgcaccaccatactggctaagttttatattttttgttgagatgaagtttcactgtgttgtccaggctggtcttgaactcctgggcttaagtgatccacctacttcagccttccaaagtgctgggattacaggcaggagccactgtgtccagcttacattttttgtataatcaacattagccagagtaaccacactttagatctgttggtcttcaggaaaagcaatatgtgtctggatgtggtggctcacacctgtaatcccaacactttgggaggccgaggtcggaggatcacctgaggtcaggagtttgaaaccagcctggccaacatggtggaactccatctctactaaaaaaaaaatacaaaaattagccggatgtggtggtgcacacctgtaatcccagctacttgggaggctgagacaggaaaatcacttaaaacccaggaggcggaggttacagttagctgagattgcgccactgcagtccagcctgggtgacagagtgagactctgtctcaaaaaaaaagcgaagttacatgcaataaaatcacacagaaaaattatttttaataaaaaattaaaacaattgacagatatcagttatatgatttattgttccaactgttatatgtgtatttctgagtgccctttggcttcttgcccggtggtacttgaagtcataggataaacatggcatattttccttaagtgtcaatattactcaacaaatataggttaaaaaagcattctatctgatgt

SEQ ID NO: 1057 - DNA, 94 bp, Homo sapiens
acgtgcaggtttgttacgtatatatacatgtgccatgttggtgtgctgcacccattaactcgtcatttaacattaggtatatctcctaatccta

SEQ ID NO: 1058 - DNA, 199 bp, Homo sapiens
tgcaacctctgcctcccgtgttcaggtgattctcctgcctcagcctcctgagtagctgggattacaggcatccaccaccacgttcagcaaatttttgtatttttagtagagatggggtttcatcatgttggccaggctggtctcgaactcctgacttcaggtaatctgttctccttggcctcccaaagtgctgggatta

SEQ ID NO: 1059 - DNA, 3357 bp, Homo sapiens
ccggggtcccagttctaaagtccccacgcacccacccggactcagaatctcctcagacgccgagatgcgggtcacggcgccccgaaccctcctcctgctgctctggggggcagtggccctgaccgagacctgggccggtgagtgcggggtcgggagggaaatggcctctgtggggaggagagaggggaccgcaggcgggggcgcaggacccggggagccgcgccgggaggagggtcgggcgggtctcagcccctcctcgcccccaggctcccactccatgaggtatttctacaccgccatgtcccggcccggccgcggggagccccgcttcatcaccgtgggctacgtggacgacacgctgttcgtgaggttcgacagcgacgccacgagtccgaggaaggagccgcgggcgccatggatagagcaggaggggccggagtattgggaccgggagacacagatctccaagaccaacacacagacttaccgagagaacctgcgcaccgcgctccgctactacaaccagagcgaggccggtgagtgaccccggcccggggcgcaggtcacgactccccatcccccacgtacggcccgggtcgccccgagtctccgggtccgagatccgcccccgaggccgcgggacccgcccagaccctcgaccggcgagagccccaggcgcgtttacccggtttcattttcagttgaggccaaaatccccgcgggttggtcggggcggggcggggctcgggggacggggctgaccgcggggccggggccagggtctcacatcatccagaggatgtacggctgcgacgtggggccggacgggcgcctcctccgcgggtatgaccaggacgcctacgacggcaaggattacatcgccctgaacgaggacctgagctcctggaccgcggcggacaccgcggctcagatcacccagcgcaagtgggaggcggcccgtgtggcggagcagctgagagcctacctggagggcctgtgcgtggagtcgctccgcagatacctggagaacgggaaggagacgctgcagcgcgcgggtaccaggggcagtggggagccttccccatctcctataggtcgccggggatggcctcccacgagaagaggaggaaaatgggatcagcgctagaatgtcgccctcccttgaatggagaatggcatgagttttcctgagtttcctctgagggccccctcttctctctaggacaattaagggatgacgtctctgaggaaatggaggggaagacagtccctagaatactgatcaggggtcccctttgacccctgcagcagccttgggaaccgtgacttttcctctcaggccttgttctctgcctcacactcagtgtgtttggggctctgattccagcacttctgagtcactttacctccactcagatcaggagcagaagtccctgttccccgctcagagactcgaactttccaatgaataggagattatcccaggtgcctgcgtccaggctggtgtctgggttctgtgccccttccccaccccaggtgtcctgtccattctcaggctggtcacatgggtggtcctagggtgtcccatgagagatgcaaagcgcctgaattttctgactcttcccatcagaccccccaaagacacatgtgacccaccaccccatctctgaccatgaggtcaccctgaggtgctgggccctgggcttctaccctgcggagatcacactgacctggcagcgggatggcgaggaccaaactcaggacaccgagcttgtggagaccagaccagcaggagatagaaccttccagaagtgggcagctgtggtggtgccttctggagaagagcagagatacacatgccatgtacagcatgaggggctgccgaagcccctcaccctgagatggggtaaggagggggatgaggggtcatatctcttctcagggaaagcaggagcccttcagcagggtcagggcccctcatcttcccttcctttcccagagccgtcttcccagtccaccgtccccatcgtgggcattgttgctggcctggctgtcctagcagttgtggtcatcggagctgtggtcgctgctgtgatgtgtaggaggaagagctcaggtagggaaggggtgaggggtggggtctgggttttcttgtcccactgggggtttcaagccccaggtagaagtgttccctgcctcattactgggaagcagcatccacacaggggctaacgcagcctgggaccctgtgtgccagcacttactcttttgtgcagcacatgtgacaatgaaggacggatgtatcaccttggtggttgtggtgttggggtcctgattccagcattcatgagtcaggggaaggtccctgctaaggacagaccttaggagggcagttggtccaggacccacacttgctttcctcgtgtttcctgatcctgccttgggtctgtagtcatacttctggaaattccttttgggtccaagacgaggaggttcctctaagatctcatggccctgcttcctcccagtcccctcacagggcattttcttcccacaggtggaaaaggagggagctactctcaggctgcgtgtaagtgatgggggcgggagtgtggaggagctcacccaccccataattcctcctgtcccacgtctcctgcgggctctgaccaggtcctgtttttgttctactccaggcagcgacagtgcccagggctctgatgtgtctctcacagcttgaaaaggtgagattcttggggtctagagtgggtggggtggcaggtctgggggtgggtggggcagtggggaaaggcctgggtaatggagattctttgattgggatgtttcgcgtgtgtggtgggctgtttagagtgtcatcacttaccatgactaaccagaatttgttcatgactgttgttttctgtagcctgagacagctgtcttgtgagggactgagatgcaggatttcttcacgcctcccctttgtgacttcaagagcctctggcatctctttctgcaaaggcacctgaatgtgtctgcgtccctgttagcataatgtgaggaggtggagagacagcccacccccgtgtccaccgtgacccctgttcccatgctgacttgtgtttcctccccagtcatctttcctgttccagagaggtggggctggatgtctccatctctgtctcaactttatgtgcactgagctgcaacttcttacttccctactgaaaataagaatctgaatataaatttgttttctcaaatatttgctatgagaggttgatggattaattaaataagtcaattcctggaatttgagagagcaaataaagacctgagaaccttccagaatctgca

SEQ ID NO: 1060 - DNA, 3357 bp, Homo sapiens
ccgcggtcccagttctaaagtccccacgcacccacccggactcagagtctcctcagacgccgagatgctggtcatggcgccccgaaccgtcctcctgctgctctcggcggccctggccctgaccgagacctgggccggtgagtgcgggtcgggagggaaatggcctctgccgggaggagcgaggggaccgcaggcgggggcgcaggacctgaggagccgcgccgggaggagggtcgggcgggtctcagcccctcctcacccccaggctcccactccatgaggtatttctacacctccgtgtcccggcccggccgcggggagccccgcttcatctcagtgggctacgtggacgacacccagttcgtgaggttcgacagcgacgccgcgagtccgagagaggagccgcgggcgccgtggatagagcaggaggggccggagtattgggaccggaacacacagatctacaaggcccaggcacagactgaccgagagagcctgcggaacctgcgcggctactacaaccagagcgaggccggtgagtgaccccggcccggggcgcaggtcacgactccccatcccccacgtacggcccgggtcgccccgagtctccgggtccgagatccgcctccctgaggccgcgggacccgcccagaccctcgaccggcgagagccccaggcgcgtttacccggtttcattttcagttgaggccaaaatccccgcgggttggtcggggcggggcggggctcgggggactgggctgaccgcggggccggggccagggtctcacaccctccagagcatgtacggctgcgacgtggggccggacgggcgcctcctccgcgggcatgaccagtacgcctacgacggcaaggattacatcgccctgaacgaggacctgcgctcctggaccgccgcggacacggcggctcagatcacccagcgcaagtgggaggcggcccgtgaggcggagcagcggagagcctacctggagggcgagtgcgtggagtggctccgcagatacctggagaacgggaaggacaagctggagcgcgctggtaccaggggcagtggggagccttccccatctcctataggtcgccggggatggcctcccacgagaagaggaggaaaatgggatcagcgctagaatgtcgccctccgttgaatggagaatggcatgagttttcctgagtttcctctgagggccccctcttctctctagacaattaaggaatgacgtctctgaggaaatggaggggaagacagtccctagaatactgatcaggggtcccctttgacccctgcagcagccttgggaaccgtgacttttcctctcaggccttgttctctgcctcacactcagtgtgtttggggctctgattccagcacttctgagtcactttacctccactcagatcaggagcagaagtccctgttccccgctcagagactcgaactttccaatgaataggagattatcccaggtgcctgcgtccaggctggtgtctgggttctgtgccccttccccaccccaggtgtcctgtccattctcaggctggtcacatgggtggtcctagggtgtcccatgaaagatgcaaagcgcctgaattttctgactcttcccatcagaccccccaaagacacacgtgacccaccaccccatctctgaccatgaggccaccctgaggtgctgggccctgggtttctaccctgcggagatcacactgacctggcagcgggatggcgaggaccaaactcaggacactgagcttgtggagaccagaccagcaggagatagaaccttccagaagtgggcagctgtggtggtgccttctggagaagagcagagatacacatgccatgtacagcatgaggggctgccgaagcccctcaccctgagatggggtaaggagggggatgaggggtcatatctcttctcagggaaagcaggagcccttcagcagggtcagggcccctcatcttcccctcctttcccagagccgtcttcccagtccaccgtccccatcgtgggcattgttgctggcctggctgtcctagcagttgtggtcatcggagctgtggtcgctgctgtgatgtgtaggaggaagagttcaggtagggaaggggtgaggggtggggtctgggttttcttgtcccactgggggtttcaagccccaggtagaagtgttccctgcctcattactgggaagcagcatgcacacaggggctaacgcagcctgggaccctgtgtgccagcacttactcttttgtgcagcacatgtgacaatgaaggatggatgtatcaccttgatggttgtggtgttggggtcctgattccagcattcatgagtcaggggaaggtccctgctaaggacagaccttaggagggcagttggtccaggacccacacttgctttcctcgtgtttcctgatcctgccctgggtctgtagtcatacttctggaaattccttttgggtccaagactaggaggttcctctaagatctcatggccctgcttcctcccagtgccctcacaggacattttcttcccacaggtggaaaaggagggagctactctcaggctgcgtgtaagtggtgggggtgggagtgtggaggagctcacccaccccataattcctcctgtcccacgtctcctgcgggctctgaccaggtcctgtttttgttctactccaggcagcgacagtgcccagggctctgatgtgtctctcacagcttgaaaaggtgagattcttggggtctagagtgggtggggtggcgggtctgggggtgggtggggcagaggggaaaggcctgggtaatggggattctttgattgggatgtttcgcgtgtgtggtgggctgtttagagtgtcatcgcttaccatgactaaccagaatttgttcatgactgttgttttctgtagcctgagacagctgtcttgtgagggactgagatgcaggatttcttcacgcctcccctttgtgacttcaagagcctctggcatctctttctgcaaaggcacctgaatgtgtctgcgtccctgttagcataatgtgaggaggtggagagacagcccacccttgtgtccactgtgacccctgttcccatgctgacctgtgtttcctccccagtcatctttcttgttccagagaggtggggctggatgtctccatctctgtctcaactttacgtgcactgagctgcaacttcttacttccctactgaaaataagaatctgaatataaatttgttttctcaaatatttgctatgagaggttgatggattaattaaataagtcaattcctggaatttgagagagcaaataaagacctgagaaccttccagaatctgca

SEQ ID NO: 1061 - DNA, 984 bp, Homo sapiens
cctctctgcccccatttccactcctgctcttgggacacaggagactggttagatgagagtagaaagtttatttttgaacacccaggtgtggggtggctgggcgagaccatctgatggctttgggagccaggccgcagggtttagcttggatctgttgagtaggagacccttaaacatggccaccctgagctaagagctggtcttggattttgctttcttttggattaaccgagtattttgtgggattccatttgatcccttaactggctgaccagctataactcctggttatgttgttttagtgttgctccaggtgtcgttggaggagaagttgaaggtacaaggagtttgcaggagggaaggtggcagttaatgagccttcctggtgggaccggatggtgagggcaggggcatctggcccagcgtggactcgggccatagatgggaagtggtcatttggaggtcaccatctctctgacaccctgaccatagcacctgcacccctgtgctgagctgcaggtccccggcaccagcgtctgtgcagctcaggtgttgctgagccgtggcctccgcagctctccatcaggatttctcaagcttcattatgaattatctctgtgtgagctcacaacggtgactgcagagtcccaggtcatctctcagatcttctgaatcaaacatatggtctgcagttgccgcgcatgtctttggccgattttctgacaatcaaagtgaagaagttctgagctacgggaagttgggttgaaggcatgatggggaaaacatgattagttgacagcttttcccagagagtttttagacaaactcaaccttggtaaccttctcagtgggcttatgataagaaccttcaatgtgccaaaaaataaaaaaagcagcactccaggtagttaatctttgtttaaaaaacccttccccccacccagtcctgcaaacaaacaaacaaacaaaaaaaggagaaaaaaa

SEQ ID NO: 1062 - DNA, 984 bp, Homo sapiens; identical to SEQ ID NO: 1061

SEQ ID NO: 1063 - DNA, 9545 bp, Homo sapiens
aggtagaagagagaccagaaaaagattttactgagaaggtaaggaatcgttcataaacctagagggtcccaaaagttgtggatgaaattgataagaaaatatgttgcttggttttttttaataaggatgttccccagcgagggaactggactagaaagcggcccacctaacctggtatcaccttcccggaggtaggccaccgggagtcctgtccggtgtgcgttagatcctgtagagcagggaggcgtttataatgggccccaccatggagtttagggttaatccagctaatcgcagagcatccaggaggtgcctggaaatgatcccctccttacagtttactataagcccatgaagagtttccaatttggaaatggaattaaagtaacagtcctgtgatgttagatttatatgcagttttggttttgtctgaaatcgcatctgtgttagtccgttctcacactgccataaagaacttccctgagactgggtaatttacaaagaaaagagctttaattgactcacagttccgcatggctggggagacctcaggaaacttacaatcatggtgaaaagggaagcaggcaccttcttcacaaggcgacaggagagagaacatgtgaaggaggaactgtcaaacacaaagccatcagatctcctgggagcccactcactatcacgagaacagcatgggggaaactgcccccgtgatccagtctcctcccaccagggccgtccctcatcttgtggggattatggggattacaattccagatgagatttgggtggggacacagagctaaaccatatcagcatgtgatcctctcaacgttccaggggtctcgtaacatgccgggcctgtctgcagccacgctggcctctctgggtgggacttcctctcggagaggcagcggagacacctccatctccatcgacaccgaggcatccatcagggaaatcaaggtgagatgctctcttcttactgacaacttgagagaaccttttgtaaaaatcagtctttagattaaaaaaaaaaaagttaattcataaagttctggatctttcttcttggtcctctctccctcacctcccctaaaatacggtgttctcctaacatcaagacccagctcagatagtgtctcctgcaggaatctgatcctacccactgaccccccagcagggcggaccgtgtgccggccccctgcgcccctcagcacccggggaataccttagtgagagcacttggcacgttgtgttgatgcacttggtcgtctctgtatgcttggtctgcatagacattcagtccacaagtttggacaccagacggctttacctactttcacacaacccctccccactaagtatgttccccttcggcctagaacttgccctttcctttctctttgtaatgtgcctttagtagccctcatctttgtattttaatgattttttttatcccactgtagtgtaggtattattctctgctctatcctcagcacccaggacagtgccaggcatttggtagtattctgtgtgtgaaagagaaacacggtgctatttgttaaagtaactagggacagtgcatctgaaaacctgaagactggaagggcaggtgaggtgactagacctgtgtcctccagggagcagaaccaagacagaagcagctggaaggagccagaactgactcagattctgaattttctagtgctttaaactaggtttaaaagggaagcaacttccactggggatgtctgagcagctggatggccgtttgccagggaggacggagagggatttaagcatccaccagagtttggccagggttaccttgaagatgcttccaacacctatgttttataagtttacaaaaccagaagagccatttcccatgtgccacccctgggccacctgcagctccttgttgcttccctttttttttcctttttcttttcttttctttctttctttttttttttttttttttttttttggagacaagagttttgcttttgtcacccatgctggagttcaatggcacgatctcggctcactgcaacctccacctcccaggttcaagtgattctccagcctcagcctcctgagtagctgggattacaggcgcccgccaccatgcccggctaacttttgtatttttagtggagacggggtttcgccatgttggccaggctggtcttgaactcctgacctcaggtgatccacccactcggcctcccaaagtgctgggattccaggcgtgagccgctgcgcctggcctgttgtttccgtttctacagcagagcagcagagttggcggcagtcctgatgtttctctgcccttaggttgcgcgtgccgttcatttgttcaggtacttactgagaggctggctggtgccagatgctgtccccggcaccaggaatttggcaaagtagagacttggagctccataaatgcagggaaaaagtgctactgatttttgcctctagcatcttactgtacattgcacagagtaggaactcctagtgcttgaatgaattactaaataggagttgaaataacctgtaccgttttccgaggctctattttgtctgttttttaaactgtgtaaaatcatatgagatacactaaaattgtataaaatcatgtaaaaatatcatatgggatacacctgaactttaatctttaaatattgaagtttattttcccttaacgcttaataaaataaaaaagaaaattgggtgctcagactacccaaatagaaactaccctgaagtataaaagatttagggaatcacctgttttcccttgacatcatctgccttttttgccatttcccccaggaactcaatgagttaaaggaccagattcaggatgtagaaggcaaatacatgcagggattgaaagagatgaaggtaccaattcacagacgtgtggtctcacgatattaacccaacttaacttaaaaaaaaaaacaacatcctaaagaagaaattcaaagtgcatgcttactgtaaataggctccagggtgtagaagaactcacaatggcaggagtgccggcatgggtgtacactcaccattttcccaaatgcattgtttgaaccaagattgaaaatgtaactgcccagtagaaaaggttactaacatactccctgatgcatgccttagacttaccatccttcccccaggcttaaaaccagtttctcatttcccataggcgtgtgccagacacttgaagaaggttcttggttttcttcactttttgtagtagttgtatacaaaaatgcttcagttgatttgcttctcaaaatatctgatgtctactaataaggccgtcctcacatgccacacttttgaaacatcccaattatttgcaccctgtaaaatgctactaattgaagtaaagactgactatggcattggctttcttggagcgtgtgcacactgcttttagagtgtgcagtgacttcattgcaccagccaggagatgtggttgccctgttccttgacagtaaggtgggcaatcagtgactgtcttccttaggcagcagcggatcatggatctggaagtgggtggcgtatctgttacttccttttcagccccctagaaagtacctgcaagatcatttgaatttaatatcaaagggcaccagacagaggaggtgacatcgatcatgactaattcactatcttcatatctgccacctttcctgaaagggggaaaaataagactctggctttcaattcatgcgaaaaggagccacttggccaggcgtggtggctcacgcctgtaattccacactttgggaggccgaggtgggtggatcaccggaggtcaggagtttgagaccagcctggccaacatggtgagaccccgtctctactaaaaatataaaaattagccaggtgtggtggtgcgcacctgtaatcccagctacttgggaggctgagtcaggagaatcacttgaacccggcaggtggaggctgcagtgagccgagatcgtgccactgcactccagcctgggtgacagagcgagacactgtttcaaaaaagaaaaaatgctgctggggagccactgaaccaaccggagacccgctggtcccacgtgaagcagctgtcctggtgtggaggtacagagctagaccagcactggtccctccagccccctggtagcctctgctgcacctgaactggcagctcttgccgctgcctttagctctgcatgtatgcgccctgaaggttctgcctctctgttttggaatcgccttcccctcctcatgtttggggacctgcaagggtgtgaggcacgtgagggcatcgccatgcgtattttacaggcctctttctctggactgtccttcaaagggaatgacctttgtctttccaggacctacccagtgagatctgcctgccattttcctatgagtcaaaaatctgaactcactactgctcctttcctggttcataagccagagtagggctggttggcagtcactggcttgtggccctatgtaattatctcagccatcacacactggctctttcacaagggctggtcacacgcctcgagtgattcttcagaaatctgttgaacagcctgacacccagccctaggacgccgtgctggggggattccccagctactgagtggggccagagactctactgcctctgtgaccacatccctttccatactggtatctcgtttgttctaatgagtgtgtccattgcttttaatagtgaattttctgagcaatgagaatttgaccaaattgaaaagggggatttccatgcatttgaaattgccatgtgtttcttcttctgatccatttgctctaagaaatatagtctaagtttaggactgagggtttttttttaacagaatactgaatgattctttgttttgatttttttattgcaatttcaaaaatatgacctgctttccacaggactctctagcagaagttgaagagaaatataagaaggctatggtttccaatgctcagctagacaatgaaaagacaaacttcatgtaccaggttgataccctaaaagatatgttgctggagcttgaagaacagctggctgaatctaggcggcagtacgaagagaaaaacaaagtaagcattagtatgatacagaatgttaacaataggctgcgtgcagtggcccatgcctgtaattctggtactttgggaggccaaggtgggaggattacttgagcccaagagttcgagaccagcctgggcaacatggcgagacatcatttctaaaaagaattaaaacaattagccaggtggtacatggctgtagtcccagctacttgggaagctgaggtgggaggatcacttgagcctggaaggttgaggctgcagtgagctgtgttgacaccactgcactccagcttgggcaacagagaagacactgtctcaaaaaaaaaaaaaaaaaaagggaatggtagggtgtgtgtgtgtgtgtgtgtatgtatgtatgtatgtgtggatatatcgtgtgtatgtatgtatatataatgtataatttacattatgtatttttatatttttaaacaatggctctccgcttatccaggaaatccaaacatctgagaataaaagtaccatactctttgccaagtgacttgaaatattgatacgtataatttcaacatgtaaactggagacagtttttctaggagaacatctaagctaaaagcaaaaccatgaaaaaacatacctatgaaagagccaccatgctcagataaggtgcgatcagatgcttcaagattttcctattcatatgtattttctgatttttattttgttctctctcaacaccatagggaaatagttatgagtatcaaagattttaagaaaattatattattttctgctgattgggaaaagacacagttactctacttaagaattaaatatatcaccaagctcagagagagagatagtcttatctgagctttcattaggaaccactggaactagtttgttaatagctgagatcagatataatttctattgagagtctcaagcatgagtcatgtgttaagataagtaatgacagcggactgattccacgaaggctgggcttggatgttctttagatagaaagcaaggaatacttttttcatacttttaggaattgtccaatttttcagagattctgagaaaaacagaaaatgtaatgtgtgagtgtcgttgttgttgttgtttttaactggctattatcctctaaatccaaagggttaaaaccaaggtacccttgacaaccttcaggcctgcttcttcgactgctatagaattgagttggaagctgaagaacattttacgcacaaagttccttatagctgaactctgcaagaggggagcttttcacaagactgatgtcatgtgggaacggaggagtggagagcacagcccagccccccttcgggtgggggcctgtaatgcatatgcattcctcctggaatgctgtcattaggcatcattcagtggactgaaaactcccgagtctcactccagagaagctggatggtgctagaatgctgtcccgagatggacacaggggccatgcaaagccccacaggagggcccttgtcatagccaggagggcaccagccacccccaagctaaaggaagtgggcgaacagaagtgccagggtgagcagaagctcaggccagatcccatctcagatcacccgcctgacaggtctagggaaggagcgtcctgcaggcctgtaagctgtcagcaaagtgagttgggtctcaggccgtcaccagggattgcgctgctgtgactgggcaggaacacagcagagccgagctgccagcttcctgggctgagcctcaggtggggaggccaggcctgaggagcagctaggttttgcaggctctccatttgctcccccaaactctcctgtttttgtctcttaaggggcagccctgaagcacagagctggccaccagctgttcatgagagatgctttagtaggccatgtttatctcctttttatcccaaagagttttccttgtcatatttcagcaggggccattttatggtaagtccttgcagggcagcctcacccaggctctcagcacagtgctgtggaagacaccaggctccctgggggggcccttcgtcggctcttgcttcactgtagataagaaatcagaaaatccttgttgattgcatcaactcctcaggttaatttgacagtaagtcatcaggcatcatctataaagtccagaggaatctgtttgtgttgtttgaaagggcttgaaggccaggtgcagtggctcatgcctgtaatcccaacactttgggaggctggggcaggtggatcgcttgaggtcaagagtttgagaccagtttggccaacatggtgaaacccgatctctaccaaaaatagaaaaattagccgggcatggaggcaggcgcctgtattcccagctacttgggaggctgaggcagcagaatcgcttgaacccaggaggcagaggttgcagtgagctgagatcgcaccactgtactccagcctggacaacagagcaagactccatctcaaaaaaatatataaataaaaaataaaataaaagaccttgaagattgtgatgatgtagtagcaggtgatttgttccacagaaactataaatcgtgagagcctgaactggcatgccagaaacatgggattccactgctttagtgctgtttttctcctttacaggaatttgaaagggaaaaacacgcccacagtatactgcaatttcagtttgctgaagtcaaggaggccctgaagcaaagagaggaaatgctcgaggtaggtagcattctcctgcttttcttttccttttttccctttggagcattttgtcaggccatgactatcttagcttaggctgcagtaataaaataccatacacagcatggcttaaacaacagaaattaattttcttacaattctggaggctgggagtccaagatcaaggttgggttcaggtgaggcctctcttcctggcctgcagacagccaccttcttgctatatccttcctccaacggtggagaaaaagcaatgtctctgatgtctcttcatataaggacactaatcctatttgatcaggaccccactcttatgacctcatttaaccttaattacttcgtaaaaaccctatctccaaatacagtcacattgggcattagggcttcaacagatgaatttagagggacacaattcattccatggcaattactaaagttttcagttttcttaaatctgagagtttaggctaactctccatccctagatttacgaaacagtccctctcattggtgaacattcctattctttggtgatcttgtatttgtttggggaggtgtggtagacagaataatggtcccccgaagttgcctacatccagatccctggaaactgtaaatatgatgccttacatggttaaagggcccctgcagttgtgatgagagaccttgagagaagggattatcctggattatttgatggaacaagcatccttctaagaggaaggcaactcaaaggcagaagtagaagatgtgacacaggaagctgaggttggagcgatgcgagagaggggccatgagccaaggaaagcagctcagtcttagaagctgaaaaaggcagggaaacagattctccctagagccttccagaaaggcttgattttagcccataagactcattttggacttctgacctctagaattgcaagagaataaatttgtgttttaagctgctgaatttatgacgattcattacaatggcaataagaaactaatacagggttggtttttaattttttgacttaatcggttctttaactgctgccttgaagtgagaatttcacccaaagcaggttttcttcctgcacttcttgaagccggaagtaggacaaggaaaaaaatcctagaatgctgacaatgagttcagggttgatgaggtgaaagagtgcttgcggcctcactcactgtcccagctctcaggttctctctcgggctggggtttttcttcctctttaaccctttatctgctttctgtctgttcctttcctcaggaaatccgacagctacagcagaaacaggcgagttctatcagggagatttctgatcttcaggaaacaatagagtggaaagacaaaaagataggggtaggattcccaagtcttgaaaatctactcaaatgggcagcctgcttagcaaatagagttttttcagagtctttagtttgcaaaaccgcttgtctgagtatgcatgcaactcccacgtgacacaaagtcgtattaatttatttaattttattaagtagtgaatacactaacttatccaaattgatatgaacttggattgtgacacggactctccatggagggtcttgtgaatgcgtagctgtgcgctctgcctgccccgtggctgggccgggccggtggttgttgaaacagctggagtgaggaggacactctgaggaggtctgatgtgtgcaagtccagacgtcttgggattatctgc

SEQ ID NO: 1064 - DNA, 7809 bp, Homo sapiens
aggtagaagagagaccagaaaaagattttactgagaaggtaaggaatcgttcataaacctagagggtcccaaaagttgtggatgaaattgataagaaaatatgttgcttggttttttttaataaggatgttccccagcgagggaactggactagaaagcggcccacctaacctggtatcaccttcccggaggtaggccaccgggagtcctgtccggtgtgcgttagatcctgtagagcagggaggcgtttataatgggccccaccatggagtttagggttaatccagctaatcgcagagcatccaggaggtgcctggaaatgatcccctccttacagtttactataagcccatgaagagtttccaatttggaaatggaattaaagtaacagtcctgtgatgttagatttatatgcagttttggttttgtctgaaatcgcatctgtgttagtccgttctcacactgccataaagaacttccctgagactgggtaatttacaaagaaaagagctttaattgactcacagttccgcatggctggggagacctcaggaaacttacaatcatggtgaaaagggaagcaggcaccttcttcacaaggcgacaggagagagaacatgtgaaggaggaactgtcaaacacaaagccatcagatctcctgggagcccactcactatcacgagaacagcatgggggaaactgcccccgtgatccagtctcctcccaccagggccgtccctcatcttgtggggattatggggattacaattccagatgagatttgggtggggacacagagctaaaccatatcagcatgtgatcctctcaacgttccaggggtctcgtaacatgccgggcctgtctgcagccacgctggcctctctgggtgggacttcctctcggagaggcagcggagacacctccatctccatcgacaccgaggcatccatcagggaaatcaaggtgagatgctctcttcttactgacaacttgagagaaccttttgtaaaaatcagtctttagattaaaaaaaaaaaagttaattcataaagttctggatctttcttcttggtcctctctccctcacctcccctaaaatacggtgttctcctaacatcaagacccagctcagatagtgtctcctgcaggaatctgatcctacccactgaccccccagcagggcggaccgtgtgccggccccctgcgcccctcagcacccggggaataccttagtgagagcacttggcacgttgtgttgatgcacttggtcgtctctgtatgcttggtctgcatagacattcagtccacaagtttggacaccagacggctttacctactttcacacaacccctccccactaagtatgttccccttcggcctagaacttgccctttcctttctctttgtaatgtgcctttagtagccctcatctttgtattttaatgattttttttatcccactgtagtgtaggtattattctctgctctatcctcagcacccaggacagtgccaggcatttggtagtattctgtgtgtgaaagagaaacacggtgctatttgttaaagtaactagggacagtgcatctgaaaacctgaagactggaagggcaggtgaggtgactagacctgtgtcctccagggagcagaaccaagacagaagcagctgaaaggagccagaactgactcagattctgaattttctagtgctttaaactaggtttaaaagggaagcaacttccactggggatgtctgagcagctggatggccgtttgccagggaggacggagagggatttaagcatccaccagagtttggccagggttaccttgaagatgcttccaacacctatgttttataagtttacaaaaccagaagagccatttcccatgtgccacccctgggccacctgcagctccttgttgcttccctttttttttcctttttcttttcttttctttctttctttttttttttttttttttttttttggagacaaaagttttgcttttgtcacccatgctggagttcaatggcacgatctcggctcactgcaacctccacctcccaggttcaagtgattctccagcctcagcctcctgagtagctgggattacaggcgcccgccaccatgcccggttaacttttgtatttttagtggagacggggtttcgccatgttggccaggctggtcttgaactcctgacctcaggtgatccacccactcggcctcccaaagtgctgggattccaggcgtgagccgctgcgcctggcctgttgtttccgtttctacagcagaacaccaaagttggcggcagtcctgatgtttctctgcccttaggttgcgcgtgccgttcatttgttcaggtacttactgagaggctggctggtgccagatgctgtccccggcaccaggaatttggcaaagtagagacttggagctccataaatgcagggaaaaagtgctactgatttttgcctctagcatcttactgtacattgcacagagtaggaactcctagtgcttgaatgaattactaaataggagttgaaataacctgtaccgttttccgaggctctattttgtctgttttttaaactgtgtaaaatcatatgagatacactaaaattgtataaaatcatgtaaaaatatcatatgggatacacctgaactttaatctttaaatattgaagtttattttcccttaacgcttaataaaataaaaaagaaaattgggtgctcagactacccaaatagaaactaccctgaagtataaaagatttagggaatcacctgttttcccttgacatcatctgccttttttgccatttcccccaggaactcaatgagttaaaggaccagattcaggatgtagaaggcaaatacatgcagggattgaaagagatgaaggtaccaattcacagacgtgtggtctcacgatattaacccaacttaacttaaaaaaaaaaacaacatcctaaagaagaaattcaaagtgcatgcttactgtaaataggctccagggtgtagaagaactcacaatggcaggagtgccggcatgggtgtacactcaccattttcccaaatgcattgtttgaaccaagattgaaaatgtaactgcccagtagaaaaggttactaacatactccctgatgcatgccttagacttaccatccttcccccaggcttaaaaccagtttctcatttcccataggcgtgtgccagacacttgaagaaggttcttggttttcttcactttttgtagtagttgtatacaaaaatgcttcagttgatttgcttctcaaaatatctgatgtctactaataaggccgtcctcacatgccacacttttgaaacatcccaattatttgcaccctgtaaaatgctactaattgaagtaaagactgactatggcattggctttcttggagcgtgtgcacactgcttttagagtgtgcagtgacttcattgcaccagccaggagatgtggttgccctgttccttgacagtaaggtgggcaatcagtgactgtcttccttaggcagcagcggatcatggatctggaagtgggtggcgtatctgttacttccttttcagccccctagaaagtacctgcaagatcatttgaatttaatatcaaagggcaccagacagaggaggtgacatcgatcatgactaattcactatcttcatatctgccacctttcctgaaagggggaaaaataagactctggctttcaattcatgcgaaaaggagccacttggccaggcgtggtggctcacgcctgtaattccacactttgggaggccgaggtgggtggatcaccggaggtcaggagtttgagaccagcctggccaacatggtgagaccccgtctctactaaaaatataaaaattagccaggtgtggtggtgcgcacctgtaatcccagctacttgggaggctgagtcaggagaatcacttgaacctggcaggtggaggctgcagtgagccgagatcgtgccactgcactccagcctgggtgacagagcgagacactgtttcaaaaaagaaaaaatgctgctggggagccactgaaccaaccggagacccgctggtcccacgtgaagcagctgtcctggtgtggaggtacagagctagaccagcactggtccctccagccccctggtagcctctgctgcacctgaactggcagctcttgccgctgcctttagctctgcatgtatgcgccctgaaggttctgcctctctgttttggaatcgccttcccctcctcatgtttggggacctgcaagggtgtgaggcacgtgagggcatcgccatgcgtattttacaggcctctttctctggactgtccttcaaagggaatgacctttgtctttccaggacctacccagtgagatctgcctgccattttcctatgagtcaaaaatctgaactcactactgctcctttcctggttcataagccagagtagggctggttggcagtcactggcttgtggccctatgtaattatctcagccatcacacactggctctttcacaagggctggtcacacgcctcgagtgattcttcagaaatctgttgaacagcctgacacccagccctaggacgccgtgctggggggattccccagctactgagtggggccagagactctactgcctctgtgaccacatccctttccatactggtatctcgtttgttctaatgagtgtgtccattgcttttaatagtgaattttctgagcaatgagaatttgaccaaattgaaaagggggatttccatgcatttgaaattgccatgtgtttcttcttctgatccatttgctctaagaaatatagtctaagtttaggactgagggtttttttttaacagaatactgaatgattctttgttttgatttttttattgcaatttcaaaaatatgacctgctttccacaggactctctagcagaagttgaagagaaatataagaaggctatggtttccaatgctcagctagacaatgaaaagacaaacttcatgtaccaggttgataccctaaaagatatgttgctggagcttgaagaacagctggctgaatctaggcggcagtacgaagagaaaaacaaagtaagcattagtatgatacagaatgttaacaataggctgcgtgcagtggcccatgcctgtaattctggtactttgggaggccaaggtgggaggattacttgagcccaagagttcgagaccagcctgggcaacatggcgagacatcatttctaaaaagaattaaaacaattagccaggtggtacatggctgtagtcccagctacttgggaagctgaggtgggaggatcacttgagcctggaaggttgaggctgcagtgagctgtgttgacaccactgcactccagcttgggcaacagagaagacactgtctcaaaaaaaaaaaaaaaaaaagggaatgctacggtgtgtgtgtgtgtgtgtgtatgtatgtatgtatgtgtggatatatcgtgtgtatgtatgtatatataatgtataatttacattatgtatttttatatttttaaacaatggctctccgcttatccaggaaatccaaactctgagaataaaagtaccatactctttgccaagtgacttgaaatattgatacgtataatttcaacatgtaaactgaagacagttttctaggagaacatctaagctaaaagcaaaaccatgaaaaaacatacctataaagagccaccatgctcagataaggtgcgatcagatgcttcaagattttcctattcatatgtattttctgatttttattttgttctctctcaacaccatagggaaatagttatgagtatcaaagattttaagaaaattatattattttctgctgattgggaaaagacacagttactctacttaagaattaaatatatcaccaagctcagagagagagatagtcttatctgagctttcattaggaaccactggaactagtttgttaatagctgagatcagatataatttctattgagagtctcaagcatgagtcatgtgttaagataagtaatgacagcggactgattccacgaaggctgggcttggatgttctttagatagaaagcaaggaatacttttttcatacttttaggaattgtccaatttttcagagattctgagaaaaacagaaaatgtaatgtgtgagtgtcgttgttgttgttgtttttaactggctattatcctctaaatccaaagggttaaaaccaaggtacccttgacaaccttcaggcctgcttcttcgactgctatagaattgagttggaagctgaagaacattttacgcacaaagttccttatagctgaactctgcaagaggggagcttttcacaagactgatgtcatgtgggaacggaggagtggagagcacagcccagccccccttcgggtgggggcctgtaatgcatatgcattcctcctggaatgctgtcattaggcatcattcagtggactgaaaactcccgagtctcactccagagaagctggatggtgctagaatgctgtcccgagatggacacaggggccatgcaaagccccacaggagggcccttgtcatagccaggagggcaccagccacccccaagctaaaggaagtgggcgaacagaagtgccagggtgagcagaagctcaggccagatcccatctcagatcacccgcctgacaggtctagggaaggagcgtcctgcaggcctgtaagctgtcagcaaagtgagttgggtctcaggccgtcaccagggattgcgctgctgtgactgggcaggaacacagcagagccgagctgccagcttcctgggctgagcctcaggtggggaggccaggcctgaggagcagctaggttttgcaggctctccatttgctcccccaaactctcctgtttttgtctcttaaggggcagccctgaagcacagagctggccaccagctgttcatgagagatgctttagtaggccatgtttatctcctttttatcccaaagagttttccttgtcatatttcagcaggggccattttatggtaagtccttgcagggcagcctcacccaggctctcagcacagtgctgtggaagacaccaggctccctgggggggcccttcgtcggctcttgcttcactgtagataagaaatcagaaaatccttgttgattgcatcaactcctcaggttaatttgacagtaagtcatcaggcatcatctataaagtccagaggaatctgtttgtgttgtttgaaagggcttgaaggccaggtgcagtggctcatgcctgtaatcccaacactttgggaggctggggcaggtggatcgcttgaggtcaagagtttgagaccagtttggccaacatggtgaaacccgatctctaccaaaaatagaaaaattagccgggcatggaggcaggcgcctgtattcccagctacttgggaggctgaggcagcagaatcgcttgaacccaggaggcagaggttgcagtgagctgagatcgcaccactgtactccagcctggacaacagagcaagactccatctcaaaaaaatatataaataaaaaataaaataaaagaccttgaagattgtgatgatgtagtagcaggtgatttgttccacagaaactataaatcgtgagagcctgaactggcatgccagaaacatgggattccactgctttagtgctgtttttctcctttacaggaatttgaaagggaaaaacacgcccacagtatactgcaatttcagtttgctgaagtcaaggaggccctgaagcaaagag

SEQ ID NO: 1065 - DNA, 1015 bp, Homo sapiens
cttctttggtttaatgcaggatcaccagactctgtggcccacgacctgtttttgtgtagcccataagacatacctttctaagtactatagctgaaaaacatcaaaagagtagtaatattttgtgacatgtgaaaattatatgaaattcaaatttctgtctgtaaacctcactggaacacagccatgctcattcgtttgtatatggtctgtggctgctttctccctacaacggtagaattgaacagttgcatcagagaccttatggcctgctaggccagaaatgttaagccctttacagagaaagcttgctggctcctgtttaatgctttaactgccctactgaaaggcaggaggttgaaaaaatgatggtagtcaaaaggaatgcatgaaatcctgttgtcttctgttagctgattgcaagtagtacacaggatatatttgagacatctcttttcctatctcccaccaaaggataattcaggcggatctcagtgcacaggcacaggcatttgcctcattcttgttttgtctgttttgaatttagttatgggaatattttaatatctctcaaaaatagggtatctggtgtgagtcagaatgattatagaacatgcttgcctggagaacaggaaatgcgggatccactcctggtgtgctgttagctgaaggacgtcagaactgtcctttaacctccctgcaggtctctaaatggtaggattgtttggggattacactagatcatctctaggcaccgttcagctcagtagagacattgctgcatggtggaaggagtgacctcagtgtgaatcctggttctgtccctttctgcccaggagaccttgagcagcttatctaaatgctgtgtgcctttgttagctcatctgaaaatgtggctgtaagaatgacctcatgagaatggactgagatcatattcttaaaactcttggcactaataggtatttaatctactataactgtgaaaattatgtctgtgaactctttttttttttttttt

SEQ ID NO: 1066 - DNA, 1015 bp, Homo sapiens; identical to SEQ ID NO: 1065

SEQ ID NO: 1067 - DNA, 130 bp, Homo sapiens
tgagacggagtttcgctcttgttgcccagactggagtgcagtggcatgatctcggctcactgcaacctctgcctcccaggttcaagcaattctcctgcctcagcctcctgagtagctgggattacaggca

SEQ ID NO: 1068 - DNA, 527 bp, Homo sapiens
gttcctttaaaagccagcttttctactagaatcaacattatttgaattacatgcaattatatgagatcatatcaatgcataggaagctagacatgtattagattgtggttaagggcatacgctttggagccatataatatagctgtggttcaaagcctggctttgccatttacttactagctgtgtatgatcttggccttccatttcctcctgggaatgataataatacttgctgtgaagattaaatgaaattacccatgtgaaatgcttagcatggtacctaagtagtgccactctaaagtttcatggcctcctactctctggacacatacctatcctctgtctgctagaactcctcacttccctgttctcctaacttacttatccttcagagcccagttcaagggacgtcttcatgaagtcccccttgccccagccctgtgcttccacagggcctgtgcacgcctctctctgcttcccactgtgtgcgggccctacctcctccttttattgtgcttcactttctt

SEQ ID NO: 1069 - DNA, 2075 bp, Homo sapiens
agcaaactgaatcagagaaggtgagtggcaaagcccatgtagctggtggcattactagaacttagcactgtgatgcacaaaggcttaactgggtttggcagcaagggtctcatggatactctttaagatgtaggcccagatctcttagtagtgaatccctgatgttccctctcttggggctctggtttagcaaggacagcgaggatactttcctctctccctcctccttactcctctctactaaggattaaggagccacctcttcctccttaaggcctttgggagagatgggtctcctggtattagaaaggagagcagacgcctagagttctgacctcttgggcctcccctaaacaaaaagcatagccccttcactaccctagtaacaagtatgacctgttgcctgttgaggtcaggtgtacctgtgtgtctctctctgtgatgtatgtgggcttggtgtccacatcaatgtgcgtgaatactcctacccacagactgctactgtgccaatatagaggttcataagaaagataaaagagaaccagcagaaccccaggttctgcctctccttcctccctttgcccagataaaggtgtacagtgtttgtggtgaggctgctggacactgctgttttgggctttctagagagaatgcaaacatgcaaaaacagtgtggtagtgtaggcagaacaagatctagaatcagaagacctggagtcgaatctcagctccaacacccactggatgaacgtggacaagctgcttgatctctcagatcctcgatttcttcatctgtaagatggaaacaatatgtgtcttttctaaggggaaagatcaaatgacatcatgtatgtgaaaatgcttagaaatgggtgatgatgatgatgatgatactgattattagggtatctaataaagttggggaaagaacaaaatccccccctcacaccctattgcaccaccagccttctccctccctgctcaattatacccatgttatagggaaggaaatagggaagaaacttgtctaaggtcacatggatgttcgcaacaattgggatgcagaacttgatctgactcccaggccaggtttgattttgatttgcagtggcagagaggactaattttttactaggttctgagccctgtactgaactctggattgccctgtacttggtggtggtatacagttcagcagtttttagcatatacacgaatttgtgcagccataaccactatctaattctagaacatttttatcacccccaaaagaaatcatgtacccatttgcagtcacttgccattccctcttctccccagccctgggaaaccactgacctaccttatatctctatgaatttgcctaatctggacatttcatataaatgcaattgtacatgtggccttttgtttctggcttctttcacttagcatgttttcaaggttcatttgtgctgtagcatttatcagtactttgttcctttttctagctgagtaacgtgtgggtatatcacattttgtttattcatctgttgagggatgtttgggttgtttctactttttgactattgtgattagtgctgctatgaacattgatgtacagatttttgtgtagatatgttttcaattatcttggggcatcttttatttttaatgtcagttttctatttttaaaaaatctagacaggttggcaaatcatttctgtaaagagtcagtaaatattttagcctttgtggtccatgacattaggtatacagattacaatttctgaactctgccattccagtgtgagagcagccatagataatatgtaaacaaatgagcatggctatgttccaataaaacttttaaaaagcaggggacagattgggcctgtggaccatagtataccaacccttaatctaaatgacacattcacatgatacattattctaaaggcacaaaaagcaaaaattctccctcccacctctgtcttccagctacggggttaccttccttgaagcagttaatgttatgagattttgtgtctccttttagacacagttaataatgagcattaaagtggctatatacta

SEQ ID NO: 1070 - DNA, 2075 bp, Homo sapiens; identical to SEQ ID NO: 1069

SEQ ID NO: 1071 - DNA, 478 bp, Homo sapiens
actgggaacagcaggaaagggcaaggtggtgacaatctaagggaggcaaatggataataaccagcatggtagggaatcttctttgttgctgtggcactgtcgatctctgttccctgaactctagtgtcctccagactagatttaaggtgtggttccccgctaaattattctctcacctcctttcagtctttgctcaaacatccttttatcagagaggctttctgacatcctgtgcaagatagcacctctcccccatcgctgttatccttacccagtttaattccacgtagcatctgccaacgcttgacatatttgttttttgtttactttctggcctgtgacaactagaatataagctctgtgagagcatttttctcttaactgcttatcttcaagtaaacagaacagtgcctgtcctgtaggaagtgtttgatacatacagattgctcaaatgaaaaaagaagggtgcgagcaagcc

SEQ ID NO: 1072 - DNA, 1011 bp, Homo sapiens
agtccttgaggaacagaaccctaaaagagagaacacctgcctaatctgactcctccatcagaataatcttttgaactcctgagatttgcccagtcattttggggccatgtctgatgaaagcttggtgatcccttttgggtcaaaaacaagctctgactgaagagatgcaagattttctcagatgatttgtgtgtcagtcagagttccgccagagaaacacaaccagtaggatatattctatcttgtctgtcttcatatccatgtatctgtcatctacctagatttaatgcaaggaattggtttatgcagttgtaggggctggctaggcaaatccaaaatccacagggcaggccgtgtggaagggaggtctggaaactctcagacaagacctgacattgcagtccactggtggaatttctccttcttcagggaaacctcagctttcaacggagtggatcagacccaaccatattatccaggataatctcctttacataaagttaactgattgtagatgtaaattacatttacaagataccttcatagcaacacctaggtcagtttttgaataactgggtattatagcatagccaggtcaacacgtaaaattgatcaccacagtccatgtcttgttaacttggcacctgtacacatttccttaaaccatttaatctcccaataaagacaataacaaagtaaaacttctgcctatcatgacacagctaatctgtgtacaactgaaaatatgctcttttcctgggagagaattcacagtccttgactggtgttcacttttatccttgataatccagtaactttaataatattatgtaaatgtagctattttaataaattttatgttagatgacaaggggataagagagggaagaaaaaatacataaacacaaacattcataacaaaacaatgaatactcataataattatagtactaacttctgcaactgttcacatgatgtgttttataactaccggtgttacaaaattactgg

SEQ ID NO: 1073 - DNA, 478 bp, Homo sapiens; identical to SEQ ID NO: 1071

SEQ ID NO: 1074 - DNA, 1011 bp, Homo sapiens; identical to SEQ ID NO: 1072

SEQ ID NO: 1075 - DNA, 5533 bp, Homo sapiens
ctacacagaagacccaaggctgcgatgctggatacctcaatttgggagctggagactggatatgcaggattgagttatttgagctgagaacccaagaagggctggcaatagctgaaggcttgagtgtgtgttaaatctgagaagtggaaccttgacctctctcatcacaatggttcacctcccgagccaccccaacacacatacccctttccttacctgctttccacttccctcaggctgagctccaagtggcacaacaggagaaccatcacttaaatttggacctgaaggaggcgaagagctggcaagaggagcagagtgctcaggctcagcgactgaaagacaaggtggcccagatgaaggacaccctaggccaggcccagcagcgggtggtgagtgaggccccttggcaacaggaaacgggaaattccaagggcaagttgtagagaagcctgcgtgtctaaagagaaggggagagacatggctaaagactaaacaacacaaccccgagtcctaatgcagtggagtggagggagcgtttacctccctggctgatgaatgattcactaggaactctgatctccatctcctcctttctcctgaggccgagctggagcccttgaaggagcagcttcgaggggccaggagcttgcagcctcaagccagcagaaagccacccttcttggggaggagttggccagtgcagcagcagccagggaccgcaccatagccgaactacaccgcagccgcctggaagtggctgaagttaacggcaggctggctgagctcggtttgcacttgaaggaagaaaaatgccaatggagcaaggagcgggcagggctgctgcagagtgtggaggtagagggatggggggtacctggcaatctgatggccactgcccccacctctgtggggactcctacatgtggtcagaccctctgggaggagagaagaggggttgagaaccttagaggacttgggtggagaggggctttgagggaggtacactttactttctaggcatgacccatccctaaccggggtatcccaatcctgatcaccagagtaccttccttggaacagaaacattttctgtcctagaccccaggccctgccataatgcccattcctgatcaagcagcacctgccgtcatgtcctgtccttcattcagagggtataggaaatgaaggcaaaaaggggaaagtgctctaaaaatgatgctttaaataaaggaaaggacacagtaagggatggtgctgttgacagtggcgttcctttttcttccccctccaccctcccattttccttcttggctatctctcaggcagagaaggacaagatcctgaagctgagtgcagagatacttcgattggagaaggcagttcaggaggagaggacccaaaaccaagtgttcaagactgagctggcccgggagaaggattctagcctggtgaggcatccagccaccaagggtcctgtcctatggcctcctgaggcatccataccccttctctctgtcttgggtatgggctcagaagtgctaggtgtccactaccatgttgggtggcatttcacttgcacacgcaagccctcattggtttgaaatgtgcatttttttctgctctcagggcacacatctgggcccagtagaggtgacttaggagaattatagagtggccccttggtatgaccaaggcctctgcaccccagcctagaggaagtcatgcaggtccccactcgagaggcagagactaagacttagaaaactgagtatctgtggcccaagacaaagtactcatggaggaagtgttgggaattcctgtgtgtgtgtgtcagagcagggaagaagcagaggcatggggagacctggttctagattgttggtcctggtcccagagtccaggttcttggaggtacattctaggctccagattccattgggccctcttccctcaggtacagttgtcagaaagtaagcgggagctgacagagctgcggtcagccctgcgtgtgctccagaaggaaaaggagcagttacaggaggagaaacaggtgagcacccataacccaggccccgtggatgccacaggtgaggacttgagggctagaaactttgtaaattcctgtcatctcttggcttagaaactgttctctccaagagggcccgtaccctggcttctcttattagctgatttggcaggacagcggatgatctctgggagaagggagggatgtaagtggtgaagcaggggtgctggggggagtgtctgcctgaagttgccccaatctttgctgaaggcatctaatgctgaggagctaagagttcttcttgggtgcagcttctgcaggctagcaaggttggcaccttcccattctctagcacctgcctttttccttcccaattccaggaattgctagagtacatgagaaagctagaggcccgcctggagaaggtggcagatgagaagtggaatgaggatgccaccacagaggatgaggaggccgctgtggggctgagtccgtgtagccccaatcttgtaacacctcttccccactctacctcccgctgttgaggaaggctccatgtaaccttgctgggagctgcctttgccttctatgtgttttgccttttctttccagcacctggcccctgtatagtctaatgataccctcatccagaggagacagctggtccaactcctcacaacacatccttttttcttctctgcctgcttcatctcctacaggctgcccggcagctctgacagactcagaggacgagtccccagaagacatgaggctcccaccctatggcctttgtgagcgtggagacccaggctcctctcctgctgggcctcgagaggcttctccccttagttgtcatcagccagccggctcccatttctcctcacctctctgggccagctgaggacagtagctctgactcggtgagcagtggaggagcctgtgcagaagcagtaaggaggggcagggccaaacccaagtgtcccagcctggagtgcagcacgatcttggctcactgcagcctctgcctcctgggctgaagcgatcctcccacctcagtctcccaagagtagctgggaccacaggcaggcacccccggctaattagagaaggaatcttagctatccagggctctctttttcccaggggagaggaggcaggcccagcctctcttcagtgccacaccagtagatatcatcccaaaacccagaccagcccaatagcctcactgcttctcccccacagtcattctcttattattcaccagcccctcaaaacgcctctcctgcctcactcttcctaagcccctcaggtcactgtcctagccttggctgctcttcccatacctgtcccaatgtgctgctcccccatcttgggacaccaccccaaagcccaaccctgtctctttggcatccaggaggctgaagatgagaagtcagtcctgatggcagctgtgcagagtgggggtgaggaggccaacttactgcttcctgaactgggcagtgccttctatgacatggccaggtgagttcaaccagcaaggccaggagggaggtgggaggaggtcagagggaaagggcatctgtgtggacagtcaccaggccctgctcccaacccctgcccttcttggcctcagccaagaaaaggagatacaggtatggttaacaaggaaaatgactcactgctccaaatcccagatgccttcaggtaatccctacccctatcttatcaatgcactcagaggtcctgcctttaactggcttctatgttgttctagcaccatcttctgcagagcccaaattgccctgcttcccctctctcctgcctctaccccttccccaaccaccaggtaggtacctagggtcctccggggaggaagggaggtgaccatggcccccagggataggagcagagagaagactgggatccagcatccatctggctacaactgaaatgctttccctcttccctgacttccctgggtaacccttagggaagggaacctatagaggtgggggtttcaggtatcagattgtccccttctgccttcccttttattcccaggttcaagggggcaggcacagggaagagagatttgatcatctagtcccggttttgcctggatgtgagatgggctcagggcagggagggggtgatgctgtcatccttctcggctggagcaggaagatgaaggacgatgtcagactcattttcagcctcattaggcagcagacggagatggagggaggagagcaggaggctgggggatgggctctgcactgcagagaccagcagggactaaagaagagaggacatggggaactggaaaaataagccttccaggattgtggggagaaagacgctgtgggagaggccaggatgctgcattaggcacaggataacctgggaacccaggcacatgggtcctgctctccgaagtctgcaagtcaagaagggaacagagcacgccgaccctctccctttcccctctgtctctcttagtggctttacagtgggtaccctgtcagaaaccagcactgggggccctgccacccccacatggaaggagtgtcctatctgtaaggagcgctttcctgctgagagtgacaaggatgccctggaggaccacatggatggacacttctttttcagcacccaggaccccttcacctttgagtgatcttactccctcgtacatgcacaaatacacactcatgcacacacacactcacacacatgcatacacttaggtttcatgcccattttctatcacactgggctccatgatattctgttccctaagaactgcttctgtgtgccctgttttcatcccaagatttctcacttcatcctctcctacctggctcttttgtcccagggaggggtcctgttcggaagcagtggctgaatttatcccctgaaagtggttttggaggaaccgggatggaggaggccttcccctgtgggaatagaatcgtccactcctagccctggttgcttctgatacacagccactgcacacacacactcacactcacactcccttgtctgatgccccaaagccaattcctggggcaccctaccctctcttatttggagtttccgttggtttacctgagttttctctggggtctgcacagaggcagcagcatggacatcatggcctctcaggtcccttttggttctcagtttcattggttcctctttctgttcccccattgacttctgtgccccaccctagccttttccataaccttaggtattcagtttggaggggttttttgtatttttgaggattcctgtattctgtatcctctcctcgcatctcctcacatggaaagaaataatgtatttgtgccttctgtgaggaatgggggaacaagtgtcccaggtatccccatttccaaggcccccctccctctccaggtccccccacagcaataaaagcttccccctgatatccatccctttgtagtttgaacaaatatatttatatgatatgtatga

SEQ ID NO: 1076 - DNA, 5543 bp, Homo sapiens
ctacacagaagacccaaggctgcgatgctggatacctcaatttgggagctggagactggatatgcaggattgagttatttgagctgagaacccaagaagggctggcaatagctgaaggcttgagtgtgtgttaaatctgagaagtggaaccttgacctctctcatcacaatggttcacctcccgagccaccccaacacacatacccctttccttacctgctttccacttccctcaggctgagctccaagtggcacaacaggagaaccatcacttaaatttggacctgaaggaggcgaagagctggcaagaggagcagagtgctcagggctcagcgactgaaagacaaggtggcccagatgaaggacaccctaggccaggcccagcagcgggtggtgagtgaggccccttggcaacaggaaacgggaaattccaagggcaagttgtagagaagcctgcgtgtctaaagagaaggggagagacatggctaaagactaaacaacacaaccccgagtcctaatgcagtggagtggagggagcgtttacctccctggctgatgaatgattcactaggaactctgatctccatctcctcctttctcctgaggccgagctggagcccttgaaggagcagcttcgaggggcccaggagcttgcagcctcaagccagcagaaagccacccttcttggggaggagttggccagtgcagcagcagccagggaccgcaccatagccgaactacaccgcagccgcctggaagtggctgaagttaacggcaggctggctgagctcggtttgcacttgaaggaagaaaaatgccaatggagcaaggagcgggcagggctgctgcagagtgtggaggtagagggatggggggtacctggcaatctgatggccactgcccccacctctgtggggactcctacatgtggtcagaccctctgggaggagagaagaggggttgagaaccttagaggacttgggtggagaggggctttgagggaggtacactttactttctaggcatgacccatccctaaccggggtatcccaatcctgatcaccagagtaccttccttggaacagaaacattttctgtcctagaccccaggccctgccataatgcccattcctgatcaagcagcacctgccgtcatgtcctgtccttcattcagagggtataggaaatgaaggcaaaaaggggaaagtgctctaaaaatgatgctttaaataaaggaaaggacacagtaagggatggtgctgttgacagtggcgttcctttttcttccccctccaccctcccattttccttcttggctatctctcaggcagagaaggacaagatcctgaagctgagtgcagagatacttcgattggagaaggcagttcaggaggagaggacccaaaaccaagtgttcaagactgagctggcccgggagaaggattctagcctggtgaggcatccagccaccaagggtcctgtcctatggcctcctgaggcatccataccccttctctctgtcttgggtatgggctcagaagtgctaggtgtccactaccatgttgggtggcatttcacttgcacacgcaagccctcattggtttgaaatgtgcatttttttctgctctcagggcacacatctgggcccagtagaggtgacttaggagaattatagagtggccccttggtatgaccaaggcctctgcaccccagcctagaggaagtcatgcaggtccccactcgagaggcagagactaagacttagaaaactgagtatctgtggcccaagacaaagtactcatggaggaagtgttgggaattcctgtgtgtgtgtgtcagagcagggaagaagcagaggcatggggagacctggttctagattgttggtcctggtcccagagtccaggttcttggaggtacattctaggctccagattccattgggccctcttccctcaggtacagttgtcagaaagtaagcgggagctgacagagctgcggtcagccctgcgtgtgctccagaaggaaaaggagcagttacaggaggagaaacaggtgagcacccataacccaggccccgtggatgccacaggtgaggacttgagggctagaaactttgtaaattcctgtcatctcttggcttagaaactgttctctccaagagggcccgtaccctggcttctcttattagctgatttggcaggacagcggatgatctctgggagaagggagggatgtaagtggtgaagcaggggtgctggggggagtgtctgcctgaagttgccccaatctttgctgaaggcatctaatgctgaggagctaagagttcttcttgggtgcagcttctgcaggctagcaaggttggcaccttcccattctctagcacctgcctttttccttcccaattccaggaatcgctagagtacatgagaaagctagaggcccgcctggagaaggtggcagatgagaagtggaatgaggatgccaccacagaggatgaggaggccgctgtggggctgagtccgtgtagccccaatcttgtaacacctcttccccactctacctcccgctgttgaggaaggctccatgtaaccttgctgggagctgcctttgccttctatgtgttttgccttttctttcccagaccctggcccctgtttagtctaatgatacccctcatccagaggagacagctggtccaactcctcacaacacatccttttttcttctctgcctgcttcatctcctacaggctgcccggcagctctgacagactcagaggacgagtccccagaagacatgaggctcccaccctatggcctttgtgagcgtggagacccaggctcctctcctgctgggcctcgagaggcttctccccttgttgtcatcagccagccggctcccatttctcctcacctctctgggccagctgaggacagtagctctgactcggtgagcagtggaggagcctgtgcagaagcagtaaggaggggcagggccaaacccaagtgtcccagcctggagtgcagcaccgatcttggctcactgcagcctctgcctcctgggctgaagcgatcctcccacctcagtctcccgagagtagctgggaccacaggcaggcacccccggctaattagagaaggaatcttagctatccagggctctctttttcccaggggagaggaggcaggcccagcctctcttcagtgccacaccagtagatatcatcccaaaacccagaccagcccaatagcctcactgcttctcccccacagtcattctcttattattcaccagcccctcaaaacgcctctcctgcctcactcttcctaagcccctcaggtcactgtcctagccttggctgctcttcccatacctgtcccaatgtgctgctcccccatcttgggacaccaccccaaagcccaaccctgtctctttggcatccaggaggctgaagatgagaagtcagtcctgatggcagctgtgcagagtgggggtgaggaggccaacttactgcttcctgaactgggcagtgccttctatgacatggccaggtgagttcaaccagcaaggccaggagggaggtgggaggaggtcagagggaaagggcatctgtgtggacagtcaccaggccctgctcccaacccctgcccttcttggcctcagccaagaaaaggagatacaggtatggttaacaaggaaaatgactcactgctccaaatcccagatgccttcaggtaatccctacccctatcttatcaatgcactcagaggtcctgcctttaactggcttctatgttgttctagcaccatcttctgcagagcccaaattgccctgcttcccctctctcctgcctctaccccttccccaaccaccaggtaggtacctagggtcctccggggaggaagggaggtgaccatggcccccagggataggagcagagagaagactgggatccagcatccatctggctacaactgaaatgctttccctcttccctgacttccctgggtaacccttagggaagggaacctatagaggtgggggtttcaggtatcagattgtccccttctgccttcccttttattcccaggttcaagggggcaggcacagggaagagagatttgatcatctagtcccggttttgcctggatgtgagatgggctcagggcagggagggggtgatgctgtcatccttctcggctggagcaggaagatgaaggacgatgtcagactcattttcagcctcattaggcagcagacggagatggagggaggagagcaggaggctgggggatgggctctgcactgcagagaccagcagggactaaagaagagaggacatggggaactggaaaaatagccttccaggattgtggggagaaagacgctgtgggagaggccaggatgctgcattagggcacaggataacctgggaacccaggcacatgggtcctgctctccgagtctgcaagtcaagaagggaacagagcacgccgaccctctccctttcccctctgtctgctgcttagtggctttgcagtgggtgccctgtcagaagccaggctctgggggccctgccgcccccacatggaaggagtgtcctatctgtaaggagcgctttcctgctgagagtgacaaggatgccctggaggaccacatggatggacacttctttttcagcacccagggccccttcacctttgagtgatcttactccctcgtacatgcacaaatacacactcatgcacacacacactcacacaacatgcatacacttaggtttcatgcccattttctatcacactgggctccatgatattctgttccctaagaactgcttctgtgtgccctgttttcatcccaagatttctcacttcatcctctcctacctggctcttttgtcccagggaggggtcctgttcggaagcagtggctgaatttatcccctgaaagtggttttggaggaaccgggatggaggaggccttcccctgtgggaatagaatcgtccactcctagccctggttgcttctgatacacagccactgcacacacacactcacactcacactcccttgtctgatgccccaaagccaattcctggggcaccctaccctctcttatttggagtttccgttggtttacctgagttttctctggggtctgcacagaggcagcagcatggacatcatggcctctcaggtcccttttggttctcagtttcattggttcctctttctgttcccccattgacttctgtgccccaccctagccttttccataaccttaggtattcagtttggaggggttttttggatttttgaggattcctgtattctggatcctctcctcgcatctcctcacatggaaagaaaataatgtatttgtgccttctgtgaggaatggggggaacaagtggtcccaggtatccccatttccaaggcccccctccctctccaggtccccccacagcaataaaagcttccccctgatatccatccctttgtagtttgaacaaatatatttatatgatatgtatga

SEQ ID NO: 1077 - DNA, 5538 bp, Homo sapiens
ctacacagaagacccaaggctgcgatgctggatacctcaatttgggagctggagactggatatgcaggattgagttatttgagctgagaacccaagaagggctggcaatagctgaaggcttgagtgtgtgttaaatctgagaagtggaaccttgacctctctcatcacaatggttcacctcccgagccaccccaacacacatacccctttccttacctgctttccacttccctcaggctgagctccaagtggcacaacaggagaaccatcacttaaatttggacctgaaggaggcgaagagctggcaagaggagcagagtgctcaggctcagcgactgaaagacaaggtggcccagatgaaggacaccctaggccaggcccagcagcgggtggtgagtgaggccccttggcaacaggaaacgggaaattccaagggcaagttgtagagaagcctgcgtgtctaaagagaaggggagagacatggctaaagactaaacaacacaaccccgagtcctaatgcagtggagtggagggagcgtttacctccctggctgatgaatgattcactaggaactctgatctccatctcctcctttctcctgaggccgagctggagcccttgaaggagcagcttcgaggggcccaggagcttgcagcctcaagccagcagaaagccacccttcttggggaggagttggccagtgcagcagcagccagggaccgcaccatagccgaactacaccgcagctgcctggaagtggctgaagttaacggcaggctggctgagctcggtttgcacttgaaggaagaaaaatgccaatggagcaaggagcgggcagggctgctgcagagtgtggaggtagagggatggggggtacctggcaatctgatggccactgcccccacctctgtggggactcctacatgtggtcagaccctctgggaggagagaagaggggttgagaaccttagaggacttgggtggagaggggctttgagggaggtacactttactttctaggcatgacccatccctaaccggggtatcccaatcctgatcaccagagtaccttccttggaacagaaacattttctgtcctagaccccaggccctgccataatgcccattcctgatcaagcagcacctgccgtcatgtcctgtccttcattcagagggtataggaaatgaaggcaaaaaggggaaagtgctctaaaaatgatgctttaaataaaggaaaggacacagtaagggatggtgctgttgacagtggcgttcctttttcttccccctccaccctcccattttccttcttggctatctctcaggcagagaaggacaagatcctgaagctgagtgcagagatacttcgattggagaaggcagttcaggaggagaggacccaaaaccaagtgttcaagactgagctggcccgggagaaggattctagcctggtgaggcatccagccaccaagggtcctgtcctatggcctcctgaggcatccataccccttctctctgtcttgggtatgggctcagaagtgctaggtgtccactaccatgttgggtggcatttcacttgcacacgcaagccctcattggtttgaaatgtgcatttttttctgctctcagggcacacatctgggcccagtagaggtgacttaggagaattatagagtggccccttggtatgaccaaggcctctgcaccccagcctagaggaagtcatgcaggtccccactcgagaggcagagactaagacttagaaaactgagtatctgtggcccaagacaaagtactcatggaggaagtgttgggaattcctgtgtgtgtgtgtcagagcagggaagaagcagaggcatggggagacctggttctagattgttggtcctggtcccagagtccaggttcttggaggtacattctaggctccagattccattgggccctcttccctcaggtacagttgtcagaaagtaagcgggagctgacagagctgcggtcagccctgcgtgtgctccagaaggaaaaggagcagttacaggaggagaaacaggtgagcacccataacccaggccccgtggatgccacaggtgaggacttgagggctagaaactttgtaaattcctgtcatctcttggcttagaaactgttctctccaagagggcccgtaccctggcttctcttattagctgatttggcaggacagcggatgatctctgggagaagggagggatgtaagtggtgaagcaggggtgctggggggagtgtctgcctgaagttgccccaatctttgctgaaggcatctaatgctgaggagctaagagttcttcttgggtgcagcttctgcaggctagcaaggttggcaccttcccattctctagcacctgcctttttccttcccaattccaggaattgctagagtacatgagaaagctagaggcccgcctggagaaggtggcagatgagaagtggaatgaggatgccaccacagaggatgaggaggccgctgtggggctgagtccgtgtagccccaatcttgtaacacctcttccccactctacctcccgctgttgaggaaggctccatgtaaccttgctgggagctgcctttgccttctatgtgttttgccttttctttcccagaccctggcccctgtttagtctaatgatacccctcatccagaggagacagctggtccaactcctcacaacacatccttttttcttctctgcctgcttcatctcctacaggctgcccggcagctctgacagactcagaggacgagtccccagaagacatgaggctcccaccctatggcctttgtgagcgtggagacccaggctcctctcctgctgggcctcgagaggcttctccccttgttgtcatcagccagccggctcccatttctcctcacctctctgggccagctgaggacagtagctctgactcggtgagcagtggaggagcctgtgcagaagcagtaaggaggggcagggccaaacccaagtgtcccagcctggagtgcagcacgatcttggctcactgcagcctctgcctcctgggctgaagcgatcctcccacctcagtctcccaagagtagctgggaccacaggcaggcacccccggctaattagagaaggaatcttagctatccagggctctctttttcccaggggagaggaggcaggcccagcctctcttcagtgccacaccagtagatatcatcccaaaacccagaccagccccaatagcctcactgcttctcccccacagtcattctcttattattcaccagcccctcaaaacgcctctcctgcctcactcttcctaagcccctcaggtcactgtcctagccttggctgctcttcccatacctgtcccaatgtgctgctcccccatcttgggacaccaccccaaagcccaaccctgtctctttggcatccaggaggctgaagatgagacagtcagtcctgatggcagctgtgcagagtgggggtgaggaggccaacttactgcttcctgaactggccagtgccttctatgacatggccaggtgagttcaaccagcaaggccaggagggcggtgggaggaggtcagagggaaagggcatctgtgtggacagtcaccaggccctgctcccaacccctgcccttcttgcctcagccaagaaaaggagatacaggtatggttaacaaggaaaatgactcactgctccaaatcccagatgccttcaggtaatccctacccctatcttatcaatgcactcagaggtcctgcctttaactggcttctatgttgttctagcaccatcttctgcagagcccaaattgccctgcttcccctctctcctgcctctaccccttccccaaccaccaggtaggtacctagggtcctccggggaggaagggaggtgaccatggcccccagggataggagcagagagaagactgggatccagcatccatctggctacaactgaaatgctttccctcttccctgacttccctgggtaacccttagggaagggaacctatagaggtgggggtttcaggtatcagattgtccccttctgccttcccttttattcccaggttcaagggggcaggcacagggaagagagatttgatcatctagtcccggttttgcctggatgtgagatgggctcagggcagggagggggtgatgctgtcatccttctcggctggagcaggaagatgaaggacgatgtcagactcattttcagcctcattaggcagcagacggagatggagggaggagagcaggaggctgggggatgggctctgcactgcagagaccagcagggactaaagaagagaggacatggggaactggaaaaataagccttccaggattgtggggagaaagacgctgtgggagaggccaggatgctgcattaggcacaggataacctgggaacccaggcacatgggtcctgctctccgaagtctgcaagtcaagaagggaacagagcacgccgaccctctccctttcccctctgtctctcttagtggctttacagtgggtaccctgtcagaaaccagcactgggggccctgccacccccacatggaaggagtgtcctatctgtaaggagcgctttcctgctgagagtgacaaggatgccctggaggaccacatggatggacacttctttttcagcacccaggaccccttcacctttgagtgatcttactccctcgtacatgcacaaatacacactcatgcacacacacactcacacacatgcatacacttaggtttcatgcccattttctatcacactgggctccatgatattctgttccctaagaactgcttctgtgtgccctgttttcatcccaagatttctcacttcatcctctcctacctggctcttttgtcccagggaggggtcctgttcggaagcagtggctgaatttatcccctgaaagtggttttggaggaaccgggatggaggaggccttcccctgtgggaatagaatcgtccactcctagccctggttgcttctgatacacagccactgcacacacacactcacactcacactcccttgtctgatgccccaaagccaattcctggggcaccctaccctctcttatttggagtttccgttggtttacctgagttttctctggggtctgcacagaggcagcagcatggacatcatggcctctcaggtcccttttggttctcagtttcattggttcctctttctgttcccccattgacttctgtgccccaccctagccttttccataaccttaggtattcagtttggaggggttttttgtatttttgaggattcctgtattctgtatcctctcctcgcatctcctcacatggaaagaaataatgtatttgtgccttctgtgaggaatggggggaacaagtggtcccaggtatccccatttccaaggcccccctccctctccaggtccccccacagcaataaaagcttccccctgatatccatccctttgtagtttgaacaaatatatttatatgatatgtatga

SEQ ID NO: 1078 - DNA, 5537 bp, Homo sapiens
ctacacagaagacccaaggctgcgatgctggatacctcaatttgggagctggagactggatatgcaggattgagttatttgagctgagaacccaagaagggctggcaatagctgaaggcttgagtgtgtgttaaatctgagaagtggaaccttgacctctctcatcacaatggttcacctcccgagccaccccaacacacatacccctttccttacctgctttccacttccctcaggctgagctccaagtggcacaacaggagaaccatcacttaaatttggacctgaaggaggcgaagagctggcaagaggagcagagtgctcaggctcagcgactgaaagacaaggtggcccagatgaaggacaccctaggccaggcccagcagcgggtggtgagtgaggccccttggcaacaggaaacgggaaattccaagggcaagttgtagagaagcctgcgtgtctaaagagaaggggagagacatggctaaagactaaacaacacaaccccgagtcctaatgcagtggagtggagggagcgtttacctccctggctgatgaatgattcactaggaactctgatctccatctcctcctttctcctgaggccgagctggagcccttgaaggagcagcttcgaggggcccaggagcttgcagcctcaagccagcagaaagccacccttcttggggaggagttggccagtgcagcagcagccagggaccgcaccatagccgaactacaccgcagccgcctggaagtggctgaagttaacggcaggctggctgagctcggtttgcacttgaaggaagaaaaatgccaatggagcaaggagcgggcagggctgctgcagagtgtggaggtagagggatggggggtacctggcaatctgatggccactgcccccacctctgtggggactcctacatgtggtcagaccctctgggaggagagaagaggggttgagaaccttagaggacttgggtggagaggggctttgagggaggtacactttactttctaggcatgacccatccctaaccggggtatcccaatcctgatcaccagagtaccttccttggaacagaaacattttctgtcctagaccccaggccctgccataatgcccattcctgatcaagcagcacctgccgtcatgtcctgtccttcattcagagggtataggaaatgaaggcaaaaaggggaaagtgctctaaaaatgatgctttaaataaaggaaaggacacagtaagggatggtgctgttgacagtggcgttcctttttcttccccctccaccctcccattttccttcttggctatctctcaggcagagaaggacaagatcctgaagctgagtgcagagatacttcgattggagaaggcagttcaggaggagaggacccaaaaccaagtgttcaagactgagctggcccgggagaaggattctagcctggtgaggcatccagccaccaagggtcctgtcctatggcctcctgaggcatccataccccttctctctgtcttgggtatgggctcagaagtgctaggtgtccactaccatgttgggtggcatttcacttgcacacgcaagccctcattggtttgaaatgtgcatttttttctgctctcagggcacacatctgggcccagtagaggtgacttaggagaattatagagtggccccttggtatgaccaaggcctctgcaccccagcctagaggaagtcatgcaggtccccactcgagaggcagagactaagacttagaaaactgagtatctgtggcccaagacaaagtactcatggaggaagtgttgggaattcctgtgtgtgtgtgtcagagcagggaagaagcagaggcatggggagacctggttctagattgttggtcctggtcccagagtccaggttcttggaggtacattctaggctccagattccattgggccctcttccctcaggtacagttgtcagaaagtaagcgggagctgacagagctgcggtcagccctgcgtgtgctccagaaggaaaaggagcagttacaggaggagaaacaggtgagcacccataacccaggccccgtggatgccacaggtgaggacttgagggctagaaactttgtaaattcctgtcatctcttggcttagaaactgttctctccaagagggcccgtaccctggcttctcttattagctgatttggcaggacagcggatgatctctgggagaagggagggatgtaagtggtgaagcaggggtgctggggggagtgtctgcctgaagttgccccaatctttgctgaaggcatctaatgctgaggagctaagagttcttcttgggtgcagcttctgcaggctagcaaggttggcaccttcccattctctagcacctgcctttttccttcccaattccaggaattgctagagtacatgagaaagctagaggcccgcctggagaaggtggcagatgagaagtggaatgaggatgccaccacagaggatgaggaggccgctgtggggctgagtccgtgtagccccaatcttgtaacacctcttccccactctacctcccgctgttgaggaaggctccatgtaaccttgctgggagctgcctttgccttctatgtgttttgccttttctttcccagaccctggcccctgtttagtctaatgatacccctcatccagaggagacagctggtccaactcctcacaacacatccttttttcttctctgcctgcttcatctcctacaggctgcccggcagctctgacagactcagaggacgagtccccagaagacatgaggctcccaccctatggcctttgtgagcgtggagacccaggctcctctcctgctgggcctcgagaggcttctccccttgttgtcatcagccagccggctcccatttctcctcacctctctgggccagctgaggacagtagctctgactcggtgagcagtggaggagcctgtgcagaagcagtaaggaggggcagggccaaacccaagtgtcccagcctggagtgcagcacgatcttggctcactgcagcctctgcctcctgggctgaagcgatcctcccacctcagtctcccaagagtagctgggaccacaggcaggcacccccggctaattagagaaggaatcttagctatccagggctctctttttcccaggggagaggaggcaggcccagcctctcttcagtgccacaccagtagatatcatcccaaaacccagaccagcccaatagcctcactgcttctcccccacagtcattctcttattattcaccagcccctcaaaacgcctctcctgcctcactcttcctaagcccctcaggtcactgtcctagccttggctgctcttcccatacctgtcccaatgtgctgctcccccatcttgggacaccaccccaaagcccaaccctgtctctttggcatccaggaggctgaagatgagaagtcagtcctgatggcagctgtgcagagtgggggtgaggaggccaacttactgcttcctgaactgggcagtgccttctatgacatggccaggtgagttcaaccagcaaggccaggagggaggtgggaggaggtcagagggaaagggcatctgtgtggacagtcaccaggccctgctcccaacccctgcccttcttggcctcagccaagaaaaggagatacaggtatggttaacaaggaaaatgactcactgctccaaatcccagatgccttcaggtaatccctacccctatcttatcaatgcactcagaggtcctgcctttaactggcttctatgttgttctagcaccatcttctgcagagcccaaattgccctgcttcccctctctcctgcctctaccccttccccaaccaccaggtaggtacctagggtcctccggggaggaagggaggtgaccatggcccccagggataggagcagagagaagactgggatccagcatccatctggctacaactgaaatgctttccctcttccctgacttccctgggtaacccttagggaagggaacctatagaggtgggggtttcaggtatcagattgtccccttctgccttcccttttattcccaggttcaagggggcaggcacagggaagagagatttgatcatctagtcccggttttgcctggatgtgagatgggctcagggcagggagggggtgatgctgtcatccttctcggctggagcaggaagatgaaggacgatgtcagactcattttcagcctcattaggcagcagacggagatggagggaggagagcaggaggctgggggatgggctctgcactgcagagaccagcagggactaaagaagagaggacatggggaactggaaaaataagccttccaggattgtggggagaaagacgctgtgggagaggccaggatgctgcattaggcacaggataacctgggaacccaggcacatgggtcctgctctccgaagtctgcaagtcaagaagggaacagagcacgccgaccctctccctttcccctctgtctctcttagtggctttacagtgggtaccctgtcagaaaccagcactgggggccctgccacccccacatggaaggagtgtcctatctgtaaggagcgctttcctgctgagagtgacaaggatgccctggaggaccacatggatggacacttctttttcagcacccaggaccccttcacctttgagtgatcttactccctcgtacatgcacaaatacacactcatgcacacacacactcacacacatgcatacacttaggtttcatgcccattttctatcacactgggctccatgatattctgttccctaagaactgcttctgtgtgccctgttttcatcccaagatttctcacttcatcctctcctacctggctcttttgtcccagggaggggtcctgttcggaagcagtggctgaatttatcccctgaaagtggttttggaggaaccgggatggaggaggccttcccctgtgggaatagaatcgtccactcctagccctggttgcttctgatacacagccactgcacacacacactcacactcacactcccttgtctgatgccccaaagccaattcctggggcaccctaccctctcttatttggagtttccgttggtttacctgagttttctctggggtctgcacagaggcagcagcatggacatcatggcctctcaggtcccttttggttctcagtttcattggttcctctttctgttcccccattgacttctgtgccccaccctagccttttccataaccttaggtattcagtttggaggggttttttgtatttttgaggattcctgtattctgtatcctctcctcgcatctcctcacatggaaagaaataatgtatttgtgccttctgtgaggaatggggggaacaagtggtcccaggtatccccatttccaaggcccccctccctctccaggtccccccacagcaataaaagcttccccctgatatccatccctttgtagtttgaacaaatatatttatatgatatgtatga

SEQ ID NO: 1079 - DNA, 436 bp, Homo sapiens
ggaaattagagataatggatctctcctctctccatcccaacccctctttattgatcctcctttaatgaaagttaattataacaatgatttaattaatagaatccctctcttcctttattgcttcccgtattaagactattaataaatacgagctgggctgacagaggcatccatcacccgcctgggattccccccatccctccttttaccttcccccctctccctctccctctcttggcctataaacttgccggggtagtgggggttaatcagagaggaattatgagccaacatccccagcaggaggtgcatttaatgaaatcatgtgtgatttattttctgggggaggttggggcgagaagaatctgggacccacacctcctggcttccagtgagtggctgccttgtgcaaaaaaggagaatagtagacaaacag

SEQ ID NO: 1080 - DNA, 368 bp, Homo sapiens
aaggcgagaggattgttcaagcccaggggttcaaaaccagcctgggcaacgtagtgagaccccatctctacaaaaaattttaaaaattagccaggcatggtggcatgcacctgtagtcccagctactcaggaagctgaggtggaaggattgcttgagcccaggaggtcaaggctgcagtgtgctgtgatcgcacccctgaacttcagcctgggtgacagagcaagattctgtctcagaaaaaaaaggggtggggtgtggggcctagtactttcaaacctttttagcagaaccctttcctctcctcccaccaataaagtttttaatcttgtgtggaatctcactgaataaacaaaaacaatgttttatt

SEQ ID NO: 1081 - DNA, 436 bp, Homo sapiens; identical to SEQ ID NO: 1079

SEQ ID NO: 1082 - DNA, 8896 bp, Homo sapiens
cggtggcggctgtgtgtcgccggagccgaagcgcgcaggcccgtcccggtggccggggagcgggcgggtgggggcgccatgtggttcatgtacctgctgagctggctgtcgctcttcatccaggtggccttcatcacgctggctgtcggtgagactgcacgaccccggcccgcgcgggctcccgccccggcatcggtgctcgttgggggtcgcatcgcgggggtttcggagccactcgggggaccactgcccggcgctcccggccttcgccgccccaaccccttcccgcctgatcctgcccctcctgtcgagcctggcagcccggcctgaccgtggctccttccaggtgtcacagagtccgctccggcactgcccgagaaagggtgactcgagtgccgcccccgcgtctgcggaccgctaaccgctgcggctcccactcttcgcgggcctgccgcgcggaacttttccccaacgcctaccgccgcctttgcgcctctggcccttcatgctccctgctctctccacctttgacacttctcctctggctggttcccattcggcctcagttgagatgtcatcttttccgggaagtccacaggggttgatggtccagcagtgccctgtcctttccctaaagtagcatttctcacactaaactcgtctgtctctccctactgttccccttccctttcccaagctgggtcagggaaggacccttgtctgtctttttcagctgtattctcagcccagggacctggctcatgccaagtgcccagcaggtgtttattgaatacgtgaaattccgttttctgagccagaggttatcattgtactgtggcatcaaatgcagactttcgttgatttttatgagatttgtccttagttgccctaagaaagttttacttctccagacttggaagggcaacacatgggatgtttggtttgttcttgaccttctggggtccatgaagggtggatggggactgggctgcagagagaggggtgaccaggatggtgggagtgaccctggctgatagtctccctgcctcccaccctgcagcggctggactctattacctggcagaactgatagaagaatacacagtggccaccagcaggatcataaaatacatgatctgggtaagtggcatctttctccaggagtcctcctcactcttttgccctgcctcaaaagcaggaagtggggagagtttggcatggatgatgaggcctgtgtctctgctgtttcctgagcatacactcttacctccttgccctgaacgctgtcttttgggtctgcactcctgggcccagatcttccctggccgccttccccaagtggcattgtttcactgcaggccttgtgctctagtccttaaggtgacagcgaagtgtacttctctgttgacaagaccgtagatttgactttgcttagctctctcccgctgtctttagccctttgctctgctcacagcatttaaaacttagaggagccataagacagttttgcatatatgttcattgccatctttctaatcggatcaagtgatttgtcctaagatcggcacagcttcgctgccctcgcccttccctggtctcatgggaggcttctcttactgaagacacagtccttgccactgatatcaaagccataggggtgactgctggtggacagacttccttcagctgcaggaaaggctgggggtaggggtgccattggagagaaagcgtccacagcccctcaagtcgcctggtgtcagcagccatgtgcactctgggcatggctgaggttgggagttcacagtggaggcaagactatagccctcagctctggtccagaggcccagcttgtgggtgttggcacagtaattagcccttcattcagccaactgtcatttgctaagcactgacaactgtaggtacttatcagtagtgtttttcaaactgtaggcatgattcattatttggctgtatagtaggtcacaatcagcattttttaaaaaaaggaacataaatagaattgaaatttgagctttgaatcatatatatgtatatatgtgttggggtcacagtgtaaaatgtttttctttttctttttttttttttgagatggagtttcgctcttattacccaggctggagtgcagtggcacaatctcagctcaccgcaacctctgcctcctgggttcaagcgattctcctgcctcagcctcccgagtagctgggattataggcatgtgccaccatgcctggctaattttgtatttttagtagagatggggtttctccatgttggtcaggctggtcacaaactcccaacctcaggtgatctgcctgccttggcctcccaaagtgttgggattccaggcgtgagccacctcgcctggcagatgtttttcttactgtgggttgctgtcaaaaagtttgagaaatgggctgggtgcggtggctcacacctgtaatcccagcactttgggaggccatcagaagtttgagaccagcctggccaacatggcaaaaccctgtctctactaaagacacaaaaattagctgggcgtggttgtgcatgcctgtagtcccaactactcaggaggctgaggcaagagaattgcttgaatccaggagatcgcgccactgcactccagcctggatgacagagtgagactccgtctcaaaaaaaaaaaaaaaaatgttgccttttgggagcagagaacctagctggggaggccagacctgtgaaatgaggagattgaagcatgaacctagtgctgcccagagcgggctgggggttggtgagtccaggaacgttgcctggaagaagcgccctgcactgtctgcctctggttgtttcagttctccaccgctgtactgattggcctctacgtctttgagcgcttccccaccagcatgattggagtgggcctattcaccaacctcgtctactttggcctcctccagaccttccccttcatcatgctgacctcgcctaacttcatcctgtcgtgtggtgagaggggacagagttggggaggcagctgatgtggttgggtgtgcccatctccatcctgggcactaaaggggatacagaaaaaggaagccagctgttgaagtcctccaggaagccaggctagttgggaagatgcggttcttactgctgaggactctagagcccaccttggctctagtgaatagaatttgttggggctggggactcagacagggagggctttcccagagaggtaagtttgaaggagagtttgggaaagaagaggttgtggattggctgaggcagggcccccaactgagcagttccagcctcaaaaaaaccacttggccagaaaaagcccaaagcccttccggtaggcaggcagctgtccgtccagtcctctgacccaaagtcattgttaggactggagcctcatggggctgtgagcaccttgcagactctggcctggtgtgaatgcctcctgggggctgcagcttctcatctcattctcactggctgccgctgcctcgggcttgagcctggatgtggaggacccagtcttcttggcgttgccctgccaccactttctgaccctggggaatcattggccctctctgggccttagcttctccatctattcagagaggatgtttctgaaagaactattgggagactcagtgggcatatagtaggtgcatataggtatttacagatattcctggaaaaggcttcggaaagtattttggttgccaagattgccattgctcctgttcatcattgctggctaccctagctttcagtcagggtatcagatggagttaggggttttttagagtgacttttctatttctatgagagagcctggagggtgaatattatccacacaaagggcatattgttaaagccaaaactggtttcttccttgggtgtgatttcaccaaagaatttgttcagcagaggtttgttagggagcccttccatggagaccaggcccctctgtccagggaagaagtcctgcccccagcccctcagcagcaggctcccctgacttcactcccttgatctgccctttaatgcctaaaagagtttttccaaaagatcttgtgggcaccaggcactatcctacctcccattatctcttagccctagagtgtggctaggcatagcagaactgtagtctttgccttagaatgggagaggcaggagagaagaaaggagacatgagaattgctgtgaggtgtgtgtgaggggacagtcagtttcaggggacatgttctttctggtgcctgcccttcacctcaccatgggaaccggcagggatgactgtctcttgagcagcctgtgtccaggatatgcacacgtgccctcttttataaactcagttacacaccaaggaggggtggctgtgtgtgtgtgtgtgtccagaacgtatcagttcacaccggtatgccttacctgggggcaggatgaggagggaccccctcccccagaatgttgaggaacctgaagactgcacctcaaagcatctagcaagtcttgcccttttattcctgaggagtgagagcctttttatttgagcaggccttctccttgctgcccagtttgtttatttgagcaggccttctccttgctgcgagtttggagtagagcctcttaggggcgtctggtctgcacacccatgatttctccccacctgtcactgtgggagagctttctttagccctcacatccacgaaaaacgaggttcatcgtcatgatgctttggattatgtaacatagaagtctcacttttataacatgcaaagagccttcttctaattttactcagaatgccctgtgcagtgggcaggttgaggctcattctcccattttagcagatgggaaacggttctaggcagtagcctactctgagttgagtgtaaagtcaggcctaagactccatggaggctcccaacttctgagggccttttgaagttaaaagtacagctttctgttattccccttaaactgactgactcttcattccctcaacaggactagtggtggtgaatcattacctagcatttcagttttttgcagaagaatattatcccttctcagaggtaagaagtgtccagcacattcagctgttaacagggacagggtagtaaaagggaacttgcatggtttactttataaacttagctatgatttgaaactgaatctgttcaaggattacatgtttgaaaaaaacaaaacatagatggtttgagaaagctgtgtggatggggacagactgtgctcatttggccgaggtggggaggacactgctcttcctcagtgagtcctttgggtccccctcgaggggtcatcctgaggtcaggaaggggtactagggtgaccttctctgacacagtcctcacagggcagggatggactgcacccctgagccccagcttttcccagtggccgccaaggttttcttctcccacgatttctccacaccctgctgctccagtttgaacctctgggaagagcaaggtcacttctttggggggtgtgggtcagtcagtcatggcttagcactttgtctgcctccttcagtccaggggagttgcttgtcctagcgaccaagatatggggtttgtggccacattcagtcattttcagcctccacctttccccacagaaggatttccatgtctgagggtggcgttccctgcttcccaggcctgggccccctttggagatcaggtgtggccccctgtgcactcttgaccaacacgcagtcaccacacccagcccactcttggcacctccggggcaccctcttctcagtctctcttgttgccaggtcctggcctatttcactttctgcctgtggataattccgtttgcgttttttgtgtcactttcggccggggagaacgtcctgccctctaccatgcagccaggaggtgagaagggatttgtaaggggcccaggtgggggcaagccagcaaggcctgggttggcaggggtccactgagggaacctgaatctagccctgtgttggagacacctggactcggggttgggagggccgtgttcacacacatgcgcacacacacacacacactctctctctctctcatattcttgcctgtatctccacagatgatgtcgtctccaattatttcaccaaaggcaagcggggcaaacgcttagggatcctggttgtcttctccttcatcaaagaggccattctacccagtcgtcagaagatatactgacccccatgcaggcaggatgtggggggcaagatcaggagagtcaggcccctgggcctctatgccaggtggggaccagaagtcgggaaggcacctaccacctgccctggctttcttcccctcaactctggagccccatccccaccctccttggggggctcagcttggctcagatctgatgcttcaagaggctgtaacctcagagggcaccaaggagggtggcagagcctgcttagccaggaggccgaggtccctcagtcctcccctgtcccttccaaggtgggtcaggaggttctggccccgctggggcaggcagggcagggtctgtgaagcttaagagcagatggtgacaagttctctgggcaggtggccatggggaggggccatggcttggcatgtccaacagaaatagtttttgctgttgaacggtgatttctgtccaagtgcagatttccgtttgaataaagcttcgcttctaggtggcactgtttgccttaataccctgacagttcatcttcctttcttcctgctaaccttctgctctggactggactcacttttctgctccagggactccttttctgggtttgggtcttgcccttcccaagggactgttcttgtggcccttaatgggaagggggcaggggtgaggagctgagcctgctcaaggagtgggaagtggggctataggcagcctctctgatgcactctcttccatctctttccccaaggctccgtgactgtcaaactgggagtaggagaggggacaatttaggactgggctagattttcagaagaacatctacaatatcctatttataaatcttcctctgggaaaaggagtggtttctggctgaatactatcttaggctcaaggagaaacaaaataaaaattagcttccaggcagcctgtttttaaagaaatgggactaatgggagaagctgtttgtcactctaagagcatccaagccctggcccgtctgtgcactcttggctcctggggagatatatctgccttctaagaaggcaggccaggtcttgggcacagacctgcatttgttgaccttgcactccaactatagtgccttgcaagtgctcaacagtacatattggaatgaagtccctatgagagccatttctggccatgttctatacctcaaagtgaggctggcaggtacagagatgaactgtacacatgtgatacatttaagccactggaaaaacccctgtgcttgaaaatatttcctctatatcatgcctggagttccatcatagcccttcatttccttggctttagcatttaccttctcttaagaataccagctttcccctttccctgagaggaagagcacatgttggtctcctcttagtgtgaacgagattgccaggcccttttctcctatgcacaccaggatagacaaggcaggggatactggcagcctgcatcatcctcccattgggctgacagctggccctactttcctccctctgctgcttggtccctcaccttgatgatgtggcttcgccccctccactctactgccagtgttctcccagggcttgctaaatccagcagacccctttcctgtcttactagatctgggcagcatttgacatggctgatcaccccttgcttcttggatggcacttccctggcacctctgtggctagttgtcctacctccctggctgttcctttcaggcttccgtgcaggcttctccacttgcccatgcacagtagggtctttcagggttctgctgtgggctccctagggaagcccatccatctggatggtttcaaggatggtgaggaatttagagttgacctccagccccaacatccttcctgatcacctgaaccacagttttgctgccctctaggtgcacagacaattcaggtccatggcccagatggtacttgctgtcttctgcaaacctgccccttctgggtacttcccttgaccccgagatcactcaggagccagacaggaaacttattctattcctgttttctctttctgcccaccacatccaatctctcaaaacggtcaggtctaccttaacatctcttgatttgagccactcccactgtcatcagctttcacctggattatcgtgacagcctcctactgcttctctatcatgtggccagagctatcttcctaaaatgcattgcatagttgatcaagtcactctctggcctaaaaccttccttggctccctgctgccctcaggataaagtctggacccctcagcatggcttgtgagactcatggtgtccttgtccctgctcacctctctggtctcatcacttgccttcttgcattctgggtcccagcctcctgtatccagagatgcagtggctctccattgccactctgattcctcctttcttttggtcacagagaaagggtactttctctgtcaaatctcaacttagacttgacttcctccaaggagctttggctatactctctcctcccgacccccaccctggcatactacacagatcactctgggctcacttgcctgcctaatggtcatctccccagtagactgtaagctccttgagggcaaggattgtgttggaatttttgtattaacagtgcctggcttggtgcctggcacctagaaagcactcaataaatgtttgtttaatgaatg

SEQ ID NO: 1083 - DNA, 854 bp, Homo sapiens
tagcagggaagcccatgccagggggacatattagttgccctccaccccattctgggtctcagcttagagcctgcagcaggaagggcttaatctgaacaagaaacagaatttcccagtgggtccttccatcctggaagcctgggcccttagggctgggagggcagtgggggtgccaaaatgtgacaacttttacaatgccaaggtgaagaatagtgtctgaccccccactctcaacctaacttggatttcctggcggcggtgggggggtgccaagagatttatttgcagagaaaagggaggcctggggtctgggcttttgattgggaagggtgactcctcgagcttgggagtgggaagcccataggcacccctccccctttcctcgccacccacaacgtgaattgccacacttcagccttcactgggctgcctcagggggagaggtagccataataactttatgggttggtttgtggggagggcagggtggggagtccttgatgagatcgcacagctgccaggaaggcttcatcgaatgtgtcacgcaggttcatggccagagtgtcggtccagaaggtgttgtcacccaggtgccgcttcctgggcacttccctcatgctgatggggtaaaagccctggggcaccttcattctgtatggccatacacgtgggtacagcatgcgcagcagcacctcaaaaggcagccgcggcacgggcgccacccagtggccgtccactgtgtgcagccgcgcaccgccgtgcccatcaggcctcacctccaggaagctgctgaagtcgtgctccggagtggggtctggatgcacgcccaggcggatgccctgcgagtggctgat

SEQ ID NO: 1084 - DNA, 397 bp, Homo sapiens
tcttgttctacatactttattttgcatgcctgtctccgccactagatgggagacttgttgacaaggactaaccggttccaggtgcccctcaggaaccctcccagaggtgtagtaaatgcatccagcgcctagcggacgccctgcgtgcccggcaaggggtgaggtgcaggcgatacaaaggtgcagaatgtaccccaaaagaacagcctagaggggaattaggccggaggatgaccgattaaaatcaccccaactcctgattgtgccgcttcctaggtgcatgacccagggcaacttcctttggccccggcttccccgtctataaaatgatttacattatctgctcaaatttccgacaagaacacacctcgcctttatcacagagcgtggcacatat

SEQ ID NO: 1085 - DNA, 364 bp, Homo sapiens
aaccaccatcaaacaggattttcgcctgctggggcaaaccagcgtggaccgcttgctgcaactctctcagggccaggcggtgaagggcaatcagctgttgcccgtctcactggtgaaaagaaaaaccaccctggcgcccaatacgcaaaccgcctctccccgcgcgttggccgattcattaatgcagctggcacgacaggtttcccgactggaaagcgggcagtgagcgcaacgcaattaatgtgagttagctcactcattaggcaccccaggctttacactttatgcttccggctcgtatgttgtgtggaattgtgagcggataacaatttcacacaggaaacagctatgaccatgattacgc

SEQ ID NO: 1086 - DNA, 686 bp, Homo sapiens
  misc_feature (95)..(95): n equals a,t,g, or c
caccaaggccagtttggaagcgaacggctaccccgaaattaagatactacagcgtgagttatgagaaagcgccacgcttcccgagggaagaaagncgggacagttatccggtagccggcagggtcgaaccagaagagcgcacgaggagcttccaaggggaaaacgcctggtatctttatagtcctgtcgggtttcgccacctctgacttgagcgtcgatttttgtgatgctcgtcaggggggcggagcctatggaaaaacgccagcaacgcggcctttttacggttcttggccttttgctggccttttgctcacatgttctttcctgcgttatcccctgattctgtggataaccgtattaccgcctttgagtgagctgataccgctcgccgcagccgaacgaccgagcgcagcgagtcagtgagcgaggaagcggaagagcgcccaatacgcaaaccgcctctccccgcgcgttggccgattcattaatgcagctggcacgacaggtttcccgactggaaagcgggcagtgagcgcaacgcaattaatgtgagttagctcactcattaggcaccccaggctttacactttatgcttccggctcgtatgttgtgtggaattgtgagcggataacaatttcacacaggaaacagctatgaccatgattacgaattcgagctcggtacc

SEQ ID NO: 1087 - DNA, 364 bp, Homo sapiens; identical to SEQ ID NO: 1085

SEQ ID NO: 1088 - DNA, 288 bp, Homo sapiens
attaagcgcggcgggtgtggtggttacgcgcagcgtgaccgctacacttgccagcgccctagcgcccgctcctttcgctttcttcccttcctttctcgccacgttcgccggctttccccgtcaagctctaaatcgggggctccctttagggttccgatttagtgctttacggcacctcgaccccaaaaaacttgatttgggtgatggttcacgtagtgggccatcgccctgatagacggtttttcgccctttgacgttggagtccacgttctttaatagtggactctt

SEQ ID NO: 1089 - DNA, 288 bp, Homo sapiens; identical to SEQ ID NO: 1088

SEQ ID NO: 1090 - DNA, 149 bp, Homo sapiens
aaacaaaaaaaaaaaaaaaaaaaaaaaaaaaaaaaaaaaaaagaaaaaaaaaaaaaaaaaaaaaaaagaaaaaaaaaaaaaaaaaaaaaaaaaaaaaaaaaaaaaaaaaaaaaaaaaaaaaaaaaacaaaaaaaaaaaaaaaaaaaaaa

SEQ ID NO: 1091 - DNA, 151 bp, Homo sapiens; identical to SEQ ID NO: 1039

SEQ ID NO: 1092 - DNA, 202 bp, Homo sapiens
aaaaaaaagaaaaaaaaaaaaaaaaataaaaaaaaaaaaaaaaaaaaaaaaaaaaaaaaaaaaaaaaaaaaaacaaaaaataaaaaaaaaaagaaaaaaaaaaaaataaaaaaaaaaataaaaaaaaacaaaaaaacaaaaaaaaaaaaaaaaaaaaaaaaaaaaaaaaaataaacaaaaaaaaaataaaacaaaaaaaaaa

SEQ ID NO: 1093 - DNA, 4171 bp, Homo sapiens
aggtcagaccgggaagctgatgtatgtgatgcacaactcagagtacccattgagctgtttcgccctctttgagaatggcccttgccttattgctgacaccaactttgatgtgcttatggtgaagctcaagggctttttccagagtgctaaggccagcaagattgagacccggggcaccaggtaccagtactgtgacttcctggtgaaggtgggcacggtcacaatggggcccagtgcccggggcatctctgtggaggtaagaccttggtgaaaataggagcaggatgttctgagggggctgcttagcaaagggctctgaagattttccagttcttctctttttttttttttgagacagagtcttgttctgtcacccaggctggaatgcaatggcacaatcttggcacactgtagcctcgacctccagggctcaagtgatccttccgcctcagtctcccaagtacctgggactacacccaccgaattaaatttttttttttttttagtagaaatgaggtcttactatgttgcccaggctgatctcagactcctgggctcaattgatcctcccatctcagccccccaaagtgctggggttacaggtatgagccaacacacctggcctccagtcctcaatttaaacagatatttatgcctacctgatccctgactccaaggcatctatgcttcctcttcgtgaatcttttatcctttctttaattattcagagactctctaacacagctggcaagtaggaagcgggaagctgggttcaaagcaagcagaaagcttcattaggaagggtggcttgctggagaagggaaaagatagtcaaggaaggcaggtgagttatgatatggagggacagtcacccatgacaagaagttctggagcagaccaggacaactcttagaacaattttctggcggtgggccctaaatcacatatgcccatatacctttccttagtatgctttaagataggttgggaagcaaaaatgtgcttttccttttgacatgctgtctgctttctttcatggtagaaagagtgtttgtgtgtgagatcacttcatctgtgacacagagagtgtgtgtgtgtctgtgtatacatacacatatatagtgacaaggagtgagagtggcagtgtagcagtggctggcttctttgggaccagggaaagttcacaacctataatgtgcccagcactgagataagaaaacaagtaagcttgcaggtctaccctttgaaaatttgtgatttatttattaagagtgaggctgaaacacacaaactctttttgaagttagtctgaaaatgctataaaagaggcagttggctctgggaattcaggccagtgtgaacactgctgactttggttgtgatgcttcctgaggatcaacatttatgtagggatttaaaatgtagagacatggggatagataagtctaggaagaatcccagttggagaaaagggcattagtggtagtttctgctcagcaacctctaggaccaagacttctaaccctttcggcttgtgatagaccttggatttgctgagacccactgaggacccgctgtttatcctccacatttctaatcttgtagtagaaacacactccacctgtttctttacttatttctccttagggttgccagtaattttgccctgccatctctccagtaaaaaattaagagagcagaaggagaaaacctaagatgtatattttttggcccatgacacactatttgggaaattctttcttagggtcagaacccaggttggttctacttagggagtaaaatttggtcttgaaaaaaactcatgagcatatgtgtccactctactctctacttaccacccccacacacattttccttctctttctctttgttgtgtctcttagaattttcttgagctctccttgaatctttacccagcatagcagggacaacacagtcctgagatcatcaaaaggggcccagatctgcttctgggtcctctgggagggctgcgggttggcacagctccaggatgagaaggtcaaagatgcctaaagatgctgggtattgagcccagtgtttaggttgaatgtttcctgtggaccaatactgtgctaggaggtgtgtgtctttagctcggggttggggaagatgggagcaggaggcaggaggtacaagagaagcagaccttgtcttagccttcattcaccctcattctctgtgcttttggttcccaggtggagtatggcccctgtgtggtagctagtgactgctggagtctgctgctcgagttcctacagagttttctaggcagccacacaccaggggctcccgcagtgtttgggaacagacatgatgcggtctacggcccagcagataccatggtccagtacatggaactcttcaacaagatccgcaagcagcagcaggtgccggtggctgggattcgttagtgatgagcagctgccagctgagctctgtcaccaggggtactccacaggaggagcaggtgctgactttcaggtccctggaccccagaaacccagggtagacatggactctactctccttctctggttctcagctgtggcttttgttctggggctgagtcccctccccaaccccctgactctcacacatagccccccatcagctgttttactccgtgccttactggatttggcctgtcctcaagaatggtaattatgaagagtggagaagtttggaccttgcctcctttaggggaaaggtaggacaggaatgtccctgcctggtactggtgggggaaatagtccgtatccccaactattaaggatttgtcccaggccaatggtgaacatgctgcattttatgtttggattgtgctgtaataagagcctcttccttccctcagaggatgtggctgggcttctatcctagagatggagtagaaggcacaactggtttgatagttactattttctgacctgtttgctgaagtgatttgcgaattgactttcctagggtgttgcctgagtcctttgaaatctccttctgacatctttcccttctgttgtgaaatatgttaagccacaggccaaactgctataagatcgaagtttgtttttttctcacctaataatagagaggtaatcagatggtctagggcagatttaactctacaaggttatcaggaactttgtttccttctgtcttattcagccattcccagtatgttttcttacccataagatcaaagcagactcatcagctccatatctgcattccactggggaaagagagagagaaaagagcagattttaaaaaaaagatatgactgagcattgctcagatcactgtggccacactttgctgaaagagatgctgggacatagaacctcttatctgggcagtcatgtgctgagttaaaactcagggattctgtgactacaagatgaaagacaatttggttgctgagatgcagttaatggcttctgttacatggagctcaatggacgtgcccaggaatgcttttggctgttattttgcagttaatacctcctgtaactaaagcatttgtttatgagttgacttgagagaagggctgatctcagagccgctttgagctaagttggattagtcacactaggaagttaattccacacctttcgtctaagtctcagtattgaggcctctccagttctcatgcaccctgatcttagggttagaatacttgaccctgatacctgcaccatgcttcatggttcctgagctctttctcctgtttcatttgagcctccaaactacatatttggtcatattgcctgcctaccccatgcctgctgcagaaatattcatccaggttaaccttgatatacacagagatggtcttggagaattgtgaatgtatgtactgtattgtcatcaaggatactgtcccttatttgaaggcatctaaagagaaactgttttcagatccaagtgctcagatctaaagcctctgcaacaagtcaggtggtggtcatgtttcccttctagttttggctgacaggaagctcagttcagtaccataactacagaacctgtcatctgtattttttgttctcaccccgtttttgttattttgtttctggttttttatattgaggtatgttttagatatagtttacaaaaataaaacgcacagatctta

SEQ ID NO: 1094 - DNA, 158 bp, Homo sapiens
taaaaaaaaaaaaaaaaaaaaaaaaaaaaaaaaaaaaaaaaaaaaaaaaaaaaaaaaaaaaaaaaaaaaaaaaaaaaaaaaaaaaaaaaacaaaaaaataaaaaaaaaaaaaataaaaaaaaaaaaaaaaaataaactaaaaaaaaaaaataaaaaaa

SEQ ID NO: 1095 - DNA, 170 bp, Homo sapiens
gaaaaaaaaaaaaaaaaaaaaataaaaaaaaaaaagaaaaaaaaaaaaaaagaagaaaaaaaaaaaaaaaaaaaaaaaaaaaaaaaaaaaaaaaaaaaaaaaaaaaaaaaaaaaaaaaaaaaaaaaaaaaaaaaaaaaaaaaaaaaaaaaaaaaaaaaaaaaaaaaaaaa

SEQ ID NO: 1096 - DNA, 151 bp, Homo sapiens; identical to SEQ ID NO: 1040
  misc_feature (4)..(4): n equals a,t,g, or c
  misc_feature (45)..(45): n equals a,t,g, or c
  misc_feature (89)..(89): n equals a,t,g, or c

SEQ ID NO: 1097 - DNA, 77 bp, Homo sapiens
aaaaaaaaaaaaaaaaaaaaaaaaaaaaaaaaaaaaaaaaaaaaaaaaaaaaaaaaaaaaaaaaaaaaaaaaaaaaa

SEQ ID NO: 1098 - DNA, 77 bp, Homo sapiens
aaataaaaaaaaaaaaaaaaaaaaaaaaaaaaaaaaaaaaaaaaaaaaaaaaaaaaaaaaataaaaaaaaaaaaaaa

SEQ ID NO: 1099 - DNA, 117 bp, Homo sapiens
gcagtggcacaatctcggctcactgcaacctccgcctcctgggttcaagcgattctcctgcctcagcctcccgagtagctgggattacaggcgcatgccaccatgcctggctaattt

SEQ ID NO: 1100 - DNA, 1669 bp, Homo sapiens
gcggctccctctctccctctggcccagtcccttccgcttgtgtccgggaagctgtgggcggtgatttaacatgactcacttgggggcataggcgctatgaagttcagtggctgggtgccaggtggcgccaatgacaccctttttctcagagcccgggctgaatggacacctccctcaaagccttccagacccagggttacggccgttcccagagacatgttcccgtgctgctgggcacacctgcagaggggagggaaggtcctgtgtttgctggtgctgctcgtcctctcacttcctaccgagcatcatgttgcaaacaaatgaccttggcaccaccgttttgcaaattgtcctttcttgggctttactttttggtctatgtgagcaaaatgaactgaagtcaaggtacgactcccaataacctgctgtgggatgagagggcttttgtcatttatgcagtctgattagttatccacgcccagagctacactttctcgatgcttctcagctctgactctcacagggccagggagaaatttttgtgccccctaaatcatgtagttggatacaaaacattccctggaggcctaccattctcaaatccccgtgcagggctctgtggggtgcaacatgaaactcgctctaactccctacgtggaggacagacagacccatcctaactccaaagccagacacaagggacaaaggtaccaaaaaggtgcaaggtgcaagaatggacgacgctggtcttccaatttgctggaatatctgtgcggctagaatggtgtcttgttcagcatatatcagcatcttgcccttgctctgtcctgcctggccacaaaggacactcagacaacaccggcctcataaatgctgcctggagaaaagcctagctaggtacggagggtcagggtatttcagaaaagagaaactgcttcagccaatgctcatgagatttaccagggaatagcaaacaagtctagtgcaagccagggttgggggagtgggagggtgattagcagagatcaatctagaaaggaggtcaaggttctgtaggtggggaaagagggtgcttgtgtattaaaacttgttttccagcagtttggagatttctcaaagaactaaaaatagaactaccattcatcccagcaatcccattactaggtatatactcaaaggaaaacaaattgttctatcaaaaagacacctgtactcctatgtttatcgcagcactattcacaatagcaaagacatggagtaaacccaggtgcccatcaacggtgaactggataaagaaaatgtagtacatatgctaccatggaatactacgcagctgtaaagaggaaagaaatcatgacctttgcaacaacatggatacagctggaggccattatgctaagtgaattaatgcagaaacagaaaactaaatatcacatgttcttatttgtaagcagaagctaaatattgggtgcacacaggcacaaagatgggagcaataaacactggggattccacaaagggagcaggcagagggaagggttgaaaaactacctatcaggtcctctgtgcactacttgtgagacagaatcattagaagcccaaacctcagcatcacacaatatacttatataacaaacctgcacattgacccctgaacctaaaattaaaa

SEQ ID NO: 1101 - DNA, 670 bp, Homo sapiens
tcggcacagtgacagaggcacccagggctcagcaagctcatggcccagcttgttggactcagagggcagaagaatcacattctaaacatgataaggtatagccagcaggaggcagattcccagattgattctccagagccttgtaggtcccaagggtgcctatgacaccaatgggaatctgaaccaacacagacagcacagtcttcttaggagaccctagtgcagcagcgctggcctcctcctgagcgtgcacgcttatatggcttctgagctggccaggctacttcatgcatttggtttaatgggtcctcgtaaggcaggagaatcttcttgaacttggagttgggtctgtggtccattggtcagtactttgttcagaggcactgagggtgggaaggctcatggagctggattctgctgctgggaagctgggtgggccttgtttgtgggcctcaggttcaggactgaatgagagtcctcttgttgcgagttgagggtgtactctgggcatgccatgccctttttttgtactaagagggtagaaaagcaaagaccagactagttggcaaattggaacccaactacccagtttatttatttcttaggcgtagaaggaataatttagggggaactgaagagccaacctaaaggaaaaaaataaaataaaggg

SEQ ID NO: 1102 - DNA, 670 bp, Homo sapiens; identical to SEQ ID NO: 1101

SEQ ID NO: 1103 - DNA, 3241 bp, Homo sapiens
ttttgatgatgagctcctagcttcaaagtcaggacccagcggggctccacgaaagcctgggcgacccagccactgggcctaagcctgacctgctgcacccctgcctccctccacagttgccgaggtactgtctgaatgccgcctgctcgcctacatatcccaggtgcccacgcagatgtccttcctcttccgcctcatcaacatcatccacgtgcagacgctgacccaggtgagaggccccggcagacacacagcagggaaggtcgattggaaaccacttcctttgtcctggtgcccagcaggtttctgtcccccactccagaagtgcgtctctggagacccagctcttctgaggactgtgctcaggaggaatcagtgtcccattgtacagacagggcctaaggaaggagggctcgcaagtgccctcaggtcacaggctgacttgcaggccagtgctctccccgcctcccccatgtccacgtccctcacaccttctgccctgctgggctttggaatcggacctgaggctgcccaactccctcactgaatagtcatgcagccttcccttctctgagcctcctgcccctcttttctagagtgagggtgatcttagcacctctcagaggtggtctttggttccgttctgaggtgaagcaccaggtgggagtgcatggtgagtggggcagaactctttccccaccgaggcgcgcaggctagtgctgaatggcacttctgaagcgggataaccgccccaacacacgcacccagccctgcctgggacggaccttccggaaggagtgatgcttgagcccaggtctggacagggacaggtgttgttgcctcaggtggggtgggaggtgggcgtggggaagaggaaggtgctcagtcaggaaactggggctgctgggggcccccttcccccagtcctatctcacctctgtgcagggagagctctgtgggtggcccgaggcctggggccactctcctccctgcctgatggctacccaggttcaccaggggccactggggctcccaccagcccctgaccctgtgggcctgtggccttgcaggagaacgtcagctgcctcaacaccagcctggtgatcctgatgctggcccgacggaaagagcggctgcccctgtacctgcggctgctgcagcggatggagcacagcaagaagtaccccggcttcctgctcaacaacttccacaacctgctgcgcttctggcagcagcactacctgcacaaggacaaggacagcacctgcctagagaacgtgagtgccccaccctcaagggggtgatgggtgggccgcggacccagggcctctcagaggggtgtcccggtgctgggcttgacctgggtcctccaggcgccccccagcccctccttctttgcccagagctcctgcatcagcttctcatactggaaggagacagtgtccatcctgttgaacccggaccggcagtcaccctctgctctcgttagctacattgaggagccctacatggacatagacagggacttcactgaggagtgaccttgggacaggcctcgggaggctgctgggccagtgtgggtgagcgtgggtacgatgccacacgccctgccctgttcccgttcctccctgctgctctctgcctgccccaggtctttgggtacaggcttggtgggagggaagtcctagaagcccttggtccccctgggtctgagggccctaggtcatggagagcctcagtccccataatgaggacagggtaccatgcccacctttccttcagaaccctggggcccagggccacccagaggtaagaggacatttagcattagctctgtgtgagctcctgccggtttcttggctgtcagtcagtcccagagtggggaggaagatatgggtgacccccaccccccatctgtgagccaagcctcccttgtccctggcctttggacccaggcaaaggcttctgagccctgggcaggggtggtgggtaccagagaatgctgccttcccccaagcctgcccctctgcctcattttcctgtagctcctctggttctgtttgctcattggccgctgtgttcatccaagggggttctcccagaagtgaggggcctttccctccatcccttggggcacggggcagctgtgcctgccctgcctctgcctgaggcagccgctcctgcctgagcctggacatggggcccttccttgtgttgccaatttattaacagcaaataaaccaattaaatggagactattaaataactttattttaaaaatgactgctgtggacctggcttttgtccctaggactgtgtttttcctcctgaaccccaaagaaaagaatgagaaggaaactggctgtggtgtttattcagggcccagggaaggctgaaggcagcagggggcgatgcagagatggcaggatcggggcaggtggcctcagccagatgtgcaacagcagacattcctctttagagcccagggggtcaggccgtcactccttgtgctgaggagaaagggatagctgagtgagcagtactacctgtcagcccccacagtccccctgcacagagagcaatgcccctgccactcctcaccttggggcccagggcgtcccgggtccgtgcccgcagcttgttggcctgggtttccgccatgtctgcccgctcctccgcatcatccagctcgtgctgggccttgcgatacttggccaggttggtgttggcctgctgctcctgggggcacacacagggccttggttccgcttgggtgactgagatgcttattctggtccctgccccagtccaagaagggagctagctcctcctggttctcaactttgttcctattgccactgtccatcctcaccaataccacagcgggaataaggaagttgggacgcaccaacttcatgtgcctttttgtgcctgccccacccctcagaggcagccccagccttggccaggggaaagcacatggggtctgttccatgagaaggagctaggtctgatctccccagagatgttagaagcttctctcttccctctgggtcactgaccttggagggtggagctgctgctgatgcctcacctggccacagaccctggggcagagctggggtgcccggtccaggtgtccaggccccagcgcactcaccgcctcctcaaactggcgcttgtagctcttgaccttgctctgcagcttgtccaccaggtcctgcatgcgagccaggttctt

SEQ ID NO: 1104 - DNA, 20295 bp, Homo sapiens
agggccatttgcgacttgaagagcggtccccataatttgctgtcatacatctgcctgggcacttcctgggggtctggttggtggcaggagaagggcataagcagggagggatgggtcatgttactgtattggctgtgtccgaatatttttactttatgttaaagttgatgaggcacaactattgcagagtccatttttccgagtctctgcgctcacctggctcctgggattgtggagggagttttgcagctttcagagtctgtgttttgggctcatggcccagccgaatggccatgctacaagtctgttcagagcaggttcgaggggcagaaacgtgtttcctcacaagctgtgactcaatcctgtctccggtggctgtgtcagcctccattgtgttccctcctccaggggcttctgaggagaatggcctgcctcacacgtcagccagaacccagctgccccagtcaatgaagattatgcatgagatcatgtacaaactggaagtgctctatgtcctctgcgtgctgctgatggggcgtcagcgaaaccaggtgggcccctctccagcgtctcaggacacggggagcaggtgctgcccgggtgctcatggtatgccaggtgctccactgggccttctgttagaatggctctcgctttagcctggcaaagcataggggtatttctccttctgttctacctataaggaaaccaggctgattccagaaccgggagtcttttcactgtgccttgctgtatggagcgtttctaggcagtcttggttggtgctgagggcagaagcaggcagttgcctctgtgaggtgaagactaaagagttgaaagctggcaagcctggccctgtggacatgctagaggagttgccaacctgatgtgggctcagggcagtgggacagagcccagagctgtgtctgcttaggaaaactgggcaagtacagggagctccagatgtgcaaggttccctgagccttgaagtagttccaagacggaggaggaggggcccataacctacagtggaggaaaaagggcttggaacagtgcggccctcctcaagactattgagaagtagccttttcctgcagaccgcgcccttctagggaggaaaccaagcatgggggcaggagaggctggaggctcagcagtccttccacatctttctgagtcagacactggactgtcacaagtctgggcaacagaggtgcagttacccccattttacaagtgaggatgaaaacgtccagaagagaatgaaagagtgtaccaggtgggagggggcagtgccctggggaggagtgtgcatagttgctggaacagtgaggcagcgcgggacagcctggagcaaacagccaggagaggagggctgagggctcacagggaccaggtcatgtcaagctgtcacaggccattttaaagactttggtttttactctgagtgaagtgagaagtcattcctctgactgcttttggaaagactggaaacagcaaggaagggaatagggcgaccattaggggccctcataatagggccaagagatgatagcagctaggaccagcacattgatggtgggactggtgggaggtggttgcattctggatatgttttgaaagataggatttgctgatggtttggatgtgaacttaagagtgaggagaggagttaagggtgactcccaaggtttttcgcccaaggaagtaggagaatggatttgccaggtattgaggtggttaagactagcaggtaaggggtggaggagcaggcttagggaggaagatggggagttgtgttttgtacaaggtagatttgaggtgtgtgttagaattgacacttggattgattacctacacctggtgttggggagatggcaaggctggaggtatcactttgggagtcctcagcatatggttgtatttaaaaccaggacactggatgagatcccacggtgatagccacagcattggtgtcccttccttcaatacggaacatgtttttaataaaaaataatagttttagggacagcttttatgcattgagtgctattacttttttgaggcactttcgcagttgcttatatgtgaaataattgtagggacagcttctgtgcattgagtgctattactttttcgaggcactttcacagttgtttgaattttcaggtatttagtaagttacacaacaggtggtgactctgtgtccccacactcgattcttgagaaagccagggcataaactgggctgtgcgctcaggggacaggcctggatagagccaggatttaaactctgctgccctgtctcctctttctgccctctcacagcagttctctgttccctgagccttcttgttgccaggttgctatgagttgttgcggtcttgagttaaactgtatgattacagtgctggttccttgggaagggaccactaatgaccttgaaatcctggccccccaaaaccactgtttcactagcgtgttctcatttgcacagtcagcatttcctgggtttctgctgtgtgccgggcaccgtgaggatctggattcccagatcctgcctacactgggtagcaaggggaagggtttccttggccaggcctcacagaaggcttcctccttaaagaggcctcctcgttaatgagcagttgggccaagttctcagaccaatcttggccaaattgaaatctcaggactggaaaggctccccatgtgctgtcaagtttcatccctctggtgctaatgaaaaccatccatatagcagtcgtttcttttagtgccccctgagtagcttctacagtacctcactgagccttttcaacagctccatcgtcccccatcgccttttctatcaagggacttgggttcaaagaatgttgcccagggtcacagagctatcttgtgaacccagggctgtctgactgcagagataaatgcctgagcctgtacccgctgcctcctctggtagagtggcacttcatctcgcccacctgcctaccatcctgctatagagcaggctacggggctggacctgagagtaggaataatgcattctacaagtaaaatttgttttacaaattttacacatgaagaagctgctattttctttctttcttttttttttttttttttttttctttttttgagacagtcttgctctgccacccaggctggagtggtgcagtgacatgacctcggctcactgcaacctctgcctccccagctcaagcgatcctcttgcctcagccctccaagtagctggggttataggcacacaccaccacacccagctaatttttgtatttttagtagagacagggtttcatcatgttggccaggatggtctgaaactcctggcctcaagtgatccgcccgccttggcctcccaaagtgctgggattaacaggcgtgagccaccatgcccggccgagaagctggtattgttaagagaaaagggaaatgatgtagtagaaacctcaaacctaagcactggcctgaacttaggagacccagggtcaggtccaagtctgccttagaaggcccctctcttcccagctgtgtgactcacccctaatctcttaagcttgggtttctagtctgtgcagtgaggcaattgcactggatgaatttttttgggccattgttggaacattttatagctgtgtgacctgggcctggcttagggccctttggagtgagacaggaaggcacatggcttggtgaacaccatagatgtcagccgtacctccccacccccagttaagcagggcaaggtagatccaggctgggttttagtaaaggcctgagtggcagaacaggtgtcattttacatcagcctcagtctaacagattctgggctgcttatgagtcttaacactggccagaggctgtgatttctagtaggaagagaatagtcacctctattactttcagtggcaaaaatcgcaattacttttacacaacctaatatgttgaaggaagaggtccatggaaatggaggctgccagggatgtctttgtcagcttctggtctcccaagataaatgcatacctgtagtgggctagaaaggggcagacttaagatctgaacacctgagttaggtgccgttgcaatcactgaccttacccaggctggtcttgctgaacttctcccccttgtaaaatagcaataagcgagcactggtgctgtgtgcagagctttacatctgctttctgactcgatccttacaacagccccgagaagggctagtaatagccttatgttatataaacaaattttaacagggaaatcattcctgcagttctgttttaaaagatataaattagtataagtgaagcctctctcccctctgatccttgacattctattctaatggttccatgaagcagctaattttaccagttattagtgtatccttctagagacatttttatgcttacaaaggcgaattgtattcctctttttttacacaatcagtaatacagcatgagcacacttgctttcccagtattatctctcggcaattgttcagttcacgacatataaaataccttgattcttttttactggtgccttgtatcccattgagtggcataccataatttattttggggtattacaaataatgctatagtgagtagtgttgtaaatatatatcatttagtgtttatatggatctgtctgagtgtaaattcctaaagtggaattgctggtttaaagggattatggatttgcaattttagagctactgccaaacactcttccctgtgcaggtcataccagtgtgccctcccaccaacagcgtgtgaatgtacccaatgcccaagtcaccaacacggtcttataaagctttgtcatctttcccagtctgaaaaagtgaaaaatcagagacatttgtaggactccttatagaggaatttctttgcctgtggcatgaattgccaatgtatgttctctgtttgtcatatttggcttgtgactttgcttgagttttgccatacagaatttttaaaggtttaggtggttgatgtcaacaagcttctttttgagcttctaggtttattataatccttcagaaaggcttttccaactcttagatcatttttttttctttgcagagatttttctagatcttagagttttttaataattgtatcttactttcagctgaaatttatcctagtgcaaagcatgaggaacattttgatgttaatacgaggagacaaatcttaaggaatttgtttaaggttacaaagtttgcacatggtaaagctaagagtcaaacccaggactcttgcatcccaaaggactcttgaatcatatgcaggactctctgaatcccaaactcatgcttctgtgataggaactaccggacattatgccttgtaggattattgtgagcattaatgagcaaagttagaaagtgggtttgtgtgtgctgggcataggggatacacggatgttttcttcagaccctggccctccttactgacagtactgatacttgtcctgaatatcattatcgtgtgtactgagcacgaggttttgctagatttttcaagcacatttgtcttaatactttttccttcctatcccattcaggttcacagaatgattgcagagttcaagctgatccctggacttaataatttgtttgacaaactgatttggaggaagcattcagcatctgcccttgtcctccatggtcacaaccagaactgtgactgtagcccggtaagcaggagacccccggggacagatggggcctcactggcttggagtagttgtttcaagacctgctgctgaccctttgaccttttttcctttgggagtagagcagaaactaaaatcatatcttatagtcccctaattggaagctaccttggagtaggatctgagtgaactccactccccaccccaacctatgcagaaatcccttttaagatcttcctaggctgggcacagtgactcaggcctgtaatcccagcactttgggaggccgagcgggcagatcacttgaggtcaagagttacagaccagcctggccaacatggtgaaaccctgtctcactagtgtgagagacacttgcgtctctcactaaaaatacaaaaattggccaggtatggtgttgggtgcctgtaatcccaactcttcgggaggctgaggcaccagaattgcttgaacccaggaggcagaggttgcagtgagctgagatcacgccactggactccagcctgcgtaacaaagtgagactgtgtctcaaaaaaaaaaaaaaaaaaagttcctgcctgaggccctctagccaacttccccttgtaatctctgtgatagggatctcatttcactccaggcaggggctgcccactgcatgagctagcagcctgcttttccttatttgctgttttatcctattgtaattttcatccacctatagaaccgtgctcccgggcgtggtggtcacacccgtaatcccagcagtttgaaaggccaaggcgggcagatcacttgaggtcaggagttcgagaccagcctggccaacatggtgaaaccccgtctctactaaaaatacaaaaattagccaggcatgttggtggggcacctgtaatccctgctactcaggaggctgaggtgggagaatcacttgaacccgggaggtagaggttgcagtgaactaagatcaagccactgcacatccggcctgggtgacagagcaaagacactgtctcatacaaaaaaaggtggctttggttttttgagcccaagcactctcctttagcttgtgtctctcacagtccccttgagagagctctgaacaggacattggaaggcttgttggaagagcttgaatgaatcactgaatctctgagcctctgttttcttgcaaaagaaggataatactctttcccctattggccccccggctagtcggcaccctgcctaccagcatgagaaggaaagtgctctgggacctaaaagtgccacccagccatcggcctggtgccatggggccctcttctcttcactgcactctggggacttccctcagcgacctgtcttctgctttatcatttgagtttttaatttcaagcaaatatattttgcatttctagatgttctgtctggctcaattcggaaactgcttagccatgatgttaatatcttttttctgctgcatattctgtttttaatcatttttaaaatactttcttaaggtctctttcgattgctcatggggcactaatgcttgtgtttgggtcttcagacctcagggtggagtgttgcctcgtgttttgtaatgtctgtggagcggccaccagaattgcttgaacccaggaggcagaggttgcagtgagctgagatcacgccactgcactccagcctgggcaacagagtgagactgtgtctcaaaaaaaaaaaaaaaaaaaaattctgcctgaggccctctagccacttccccttgtaatctctgtgatggggatctcatttcactccaggcagggagggggctgcccactgcatgagctagcagcctgcttttccttatttgctgttttatcctattgtaattttcatccacctatagaaacgtgctcccgggcatggtggctcacacccgtaatcccagcactttgagaggccaaggcgggcagatcacttgaggtcagtggggttagtttcccccttggatacctgtgtagcctcagccctggaggcatttctacagggcacttttgcttttgtctggcagctgtcccagggccagttttcttatttaatgtcttggccctactgccccagtcgtatgagcccagggtttctgctgctcttgggagggcccccttcacccaccagcagcaccatggcagagccaggctccctgggctggtgggtcaggcctttctaacccttctttcaccaagtgtacatgctccccaggctttactgggacctgacaccctgtctagtccctgcagggcattaaaacccaagccttagtgtgactaggtcttgtctccacctctccacactgcccacagctgctgagtatcagttccttggctcactattccaaactcctcggtcctttcttcatttctaactcctatggacttcccccgctcctccccacacgtgttgttttgtttgttggttggttggatttttgggacagagtctccatcacccaggctggagtgcagtcagtggtgcgatctcggctcactgcaacttccgcctcccaggttcaagtgattctcctgcctcagcctcctgagtagccagaattacaggcgcagcaactatgcctggctaatttttgtatttttagtagagacagggtttgccatgttgcccaggctggtctcaagctcctgacctcaagcgatctgcccgcctcggcctcccaaagtgctgtgattacaggtgtaaccaccacgccccgccttattttttattgagtgtgatggcatgtttttagcaggaagggggccacattagcttaatctgctgttgatcagatgtggaagtgaacagatggttttctaactaaagaaaagtcctcatggtacatgaggacagaggcttagagaagcaggctcccaccagagtgtctgcttgtgttattttggaaccttgtggctgtggtcctaacattgaggctgtgcatgtgtttcaggacatcaccttgaagatacagtttttgaggcttcttcagagcttcagtgaccaccacgagtaagtacaagagtgtccctgcaaggagagttgttgggctgtcttcggaaggcctcgatctccttgtctggtccctgacctcagctcgagaggaggccctggagctggtggaagcccactgtcccctcagtgttagcaggtgtgacactgcagtcggacctcccgtctttccagacttccttatggcaggcactgccccaagctttcttctaaccctcatagccaccccaggaactgagtatggaagtcgttggccccttactacctttggaatcaatggatttctcaacctactgcccctctaaagcaagagtggacagcgtggctattcccaggggccggcaggaacttcagacaggcaaagccgactgcttactgagcagctggaggattcttccctccacaaggaggtgtgctcccatttttcttgaaagacattctgcgctcatttattttttaaccttcgatggagaatgtacaaggaaaattactctctgctgtaaggaaaacagtgcaggaagggggtgactagcagctgacccttgaccttggcattggggaggtgatgtggggaccttagtgaacaagaatttcagtgagctcagctccagccagctgcgtgtgcacaggaaactgggcccactgttgcataacttctgattttttctgccaagcaaaggcagaaattaagatttatgtgaaaggtcctgattttaaatgttggtttaaatattttaaaaaccttgcatttgagctaacagaacatgcctggagacagctgtggccccagggcacctccatcatatgcacccatcctctgtgagaggttttccggctgaaagccatagaagggctccaggaagcatgttaaccttctgaaaaatggcaccacatatgttatggaactgtgctgttttccctgaggaagtgagtctctggctttcatcagactcttcagtctgagtactctgtgggatatcaggatgaatgcaaacagccatggcccctgctctcatgaagggcagagtctgaaaacagagacagttgttcatccaaggattccaccgttgagcattagtgataagtggagatggtattcaggaggagaggaacggggtctgtgagagacatttgacagggtccaggactggccagaggacactcaggaactctcccctgcagaagtggcttgccagccaagacctgaagtgtcagcttgtagtgaattgagtgaacaggcatgtgagagggtgtgtgttctagccagaagcccctgaacgagggaagaccattgtggccagctgatgggagtgatgtgggcttggctctgggctgggctgcacaggacgttgtgggtcacagtcacagggtgttgtgggtcacagtcacaggcctggattttatatacagatggtccacttagaatttttcaacttcacaatggtacagaagtagaattttgaattttgatcttttcctgggctcatgataaacagttcaatactcttgcaatgctgggcactgagctgcagctgcagctcagaatgtatttcaagaaaaatggtgaccagctacacgatcaccaaggtagacaaccagtactctgtgctgtgcctgccgtgttgccagtgattatggccaactgtaggctgaagtcagtgttctgagcacattccaggtaggctaggctaagctaggaggttcagtgggttagatatattaaatgtgttttctttctttttctttttttcaagacggaatcttgctctattgcccaggctggagtgcagtggcatgatcttggctcactgcaacctccaccttctgggttcaagcaattctacctcagcctcctgagtagctaggattataggcgtgtgccaccacgcccagctaattttttatatttttagtagagatggggtttcgccacgttggccaggctggtctcgaactcctgacctcgtgatccacccgcctggaccttccaaagtgctgggattacagacgtgaaccaccgcgcccggcctcaatatgttttcaacttaacggcattttcaaatacgatgggtttatcaggacataacctcctcctaagtcaggaaatgtctgttctaaatgcagtgggaagctgtggaagtgttttcaccgggagtgacaggatcagagtcctgattctgaagatcacttttggcaccgtgtgatgactcagttcctgtgggataccttttagtaaagggagctggtgtcctgggaacacaggacccagcagtgacaggcctggatggcaagtcgggggaagtgtcacagttaaccaggcctctgtgtgatgtgtgaccgtggtgcttggtgggactgctgcagcagggccaggcttgagtgtgattggacctgttgaggtgttggtgcctttgagaaaacaagtggaaatgtaggcaaagagaaaggcccagagctgctgagggaaggggccttgtcgatgaatgtggcaggcaggggtcggggatgggggtggggccagggagagattccactgcctgagagcccagagttccctcctgcaggtgctggctggagtgagaggtgctagaggaaagtgcctggtggcttctcagattctgtccacaggaagtgggcaggagactccctacactagcctggtgctgacccagcagccccagttcctgtcctttacctcctccaacccattttgtttcaggaacaagtacttgttactcaacaaccaggagctgaatgaactcagtgccatctctctcaaggccaacatccctgaggtggaagctgtcctcaacaccgacaggtgagtgcaggggtgcagcttttccctcagcccatcccggctgcccacgttccccgggggctcaccggtgagcacatccaggtatgcacgcgtgtcctctctcacatgcagctacagtgtcctgagggctcctgtgtgccaggcattgtattcatgtcacctgcattttctcattggagcctcacagcagccctaggaggggagccccatcagtacctgcacttgacagatgaggtgagcctcagagaggtcacctgccagaagtcatgtgtgctccgcactgccccaccgccttgtctcgtgcattcagcccctttgcttatgtgctcctttcttgcctggtggcatctgcagccaagcaggacagacagaagcctcttacctgctgccaagtgttaggttgcattacctgggttaggtttgcctcacctggagccaggcagtggggggctagtctcacaggcgtcagaatacagtggactttatccaacaagagccatgatttcccaaccttttttgtttgtttgttttgttttgttttttagacacaaggtcttgctctttctctcaggctgcagagcagtggtgttatagctcactgcagccacaaacttctgagctcaagtgattctcctgcctcagccgcccgagtagctgggactacaggtgtgcgccaccattcccagctagtgtttttactttttttttgtagagatggggtctcactatgttgcccaggctggtctcgaactcctggcctcaagtgagcctcccaaagtccagggattacaggtgtgaaccacctctcctggcctcccaatcttttttttctaaggtagcagaactcttcattcaaataaaattgtacccagtcctgccctgatgtctgcagtggatcacagcagagctgctctgtttgaagggcccagacccctgcgtgcctggccgtcttccttcccccatgacggggccagagtcatttcctcatctcctgcctttgcttcatagactgggaagctgaggcttggagttgtggacacttgcccaaggccagctggaagtgaacctcaggcacggagtacgctgggcctcaccctattggcagagtctttccccatctggcagactggcatgacctgtttcaacacacttttggtataaacagctctcctctggcagttctaagccatgtctgattctggatatgtttctggcctgggaaggaaagctggcctgagatgtggtgggaatgcacttggcagtttaattctgtggctgcaggggtctccggggctctggacccagttggagcaggaaggcatcctgcagacttggaaatgtccccatggtttttcaccgcctaagccagcagaatgacccatccccagggcccctgtcagcctctcagatctgtcaccaatatctctcttctatttcaggagtttggtgtgtgatgggaagaggggcttattaactcgtctgctgcaggtcatgaagaaggagccagcagagtcgtctttcaggtgagtctggggaaaagtacctgccgattctgcggggctgcagagccaggtgtttctcaggaggttaggaatacctcctttagtcaccagcgtccatgcctcctgaagcacaattactgttggggagaggtggtttgactgccatcttgtgtagttttgactcgacaggtatgtgagagcttcttctgcagcccacagtgaccgagcattcaccaagcacctgttctgtgctggtgccttatgggtgggagagaactaggatacgggccctgccatgaattccctagagctgtgctgtttcaatgcagtgtgggaaggaatggagccagggttggcccaggagctatagcagcaaaggaaagcctcttccgctgctagggctgggggctgggtgaatacagggagaccttctctgaggtccttagatacatctaagatgagtcttgaagtcagtggacaggtagagttccatcagggccgggcgtgagctgtcaggaggcttcatgcccacatgggcctttgtcacttcagtgccttgtccaaactccctgtcgtggatacccgctgtgccctctgggtccctcggtcagcatcaaccactacttccctaggccagcccatcgtctgtgagcccagtggcctgtctgcatgtgttcgtccgcttcccacacacattcctggcccctcaattgcacgtcctcccattcttgtgaaagggcaaggcctagagtatgtttcacgggggctcgcaggagccagcccttcgatcccagatgttaccctttctgtgacacagccccttccagacagacccagatagaagacttctccactgagctggctctctgtgaggatgggggcactgctgtgtccccaggcccaggatgaagcctgatgcttggtagatgttcagtaaatgttgagtacatgaaaaggcaacaaacatctcccaaccccttggagaactgaacatgggccggaagagggcagccttagccacctgagccagtatttgggtcgcaggttttggcaagctcgggctgtggagagtttcctccgagggaccacctcctatgcagaccagatgttcctgctgaagcgaggcctcttggaggtatgatctggagcagccagtgtcttgggttccgtctccccccagcccacgcgttgctgtgtcctgtcctgagccccaaacagttcatcaggagcagagcagatctcgtgacttccaaatgcctgtgcaggctgccttagattttgccctgggtttccaactgtgggttccccatgggtgcttacggggtgacaggtttagagggtggccaggccatgcaggagggtgacagtttggttacccagcaaggcattttgaccctgaagatattttgtactaaaagttaattttcctttattgaataatggtcttcagaaaaagtaaaacttagagcagaatggccaaagttataattggtctttcagattttttcatatggacaagaaactgacccacgaattataaaatccatgtggaaaagaattgatccaaatcaatgtaacttcaagaaaatgtagaaaactttataaaggagtaaattggctttattctcttgatgaaaactcagtattttggtgtaaactctatttaaacaatttcgttcataaacacaaagacaaaccatggggtcaaaatgtgtcctttgcttttaaattctgtccttcatttacttgaatgacctcagtgcttaggcagtggcctgtgttttagacctggtgatgacagctcccctcacctaggagctgagcaccccggccatcttggtgaccacagagcaggtcacaggcttcagctgtacgccctgggcaggggagagattgtgctgcattcccagtctgctccacctcctggtgaggtctgtcaggcctggtcctgtccttggagccaccagcatcctcagacaagaatctagacagtgttgccagttccatccccaggatgcttgctcaaagccaatgcatggtctgagctccatgccaggccctggtgggggcagccacgttgacaccttcaccctgtccctcctcacccagcacatcctttactgcattgtggacagcgagtgtaagtcaagggatgtgctccagagttactttgacctcctgggggagctgatgaagttcaacgttgatgcattcaagagattcaataaatatatcaacaccgatgcaaaggtaaagttaacccagggctctgtggagtgtgctgggttgtccagaagttcacctggagtcctggtctgccaggctttaggcacaggttttacgttagagacgacgggggagtctgggcagtctttggcaaacattcattggaacctgctctgtctggctttgtgctagaccctgggaatgcagggatgaaaaccggggctgcttgtgggtagggagtgagggtgggaatgggtggcttgtgcgcctgccgtgacgcagcatggtgggtgccacggtgggagccgctgtagggagggactgggcctggtgtgttaggctcaccgagtgtgtgtgacagaaacccagctcaggctagctgaagtaaaattaaaagtaaaaattaaaggaatccagcacccttgagcgtaaaaccactggagagagtgtcggatctgtgctgaattccggggagtgcctcttagtacctgggtggtgaggggaggtccctcagcttatctgagcctctgtcttcctatctgaagcagtggggctggtagaggtcgctgatgccccttgtagtgactatccccccgggccatggccatacctggccagcagcccactgcctgctgtgagcttggtttctgtatagttccaggtattcctgaagcagatcaacagctccctggtggactccaacatgctggtgcgctgtgtcactctgtccctggaccgatttgaaaaccaggtggatatgaaaggtacatgaaaggcaggctgtcaaggcaagtcatgcagggtaagaatgctggcatcagacaccctgtctccagcagggagacaagaatgactgagggagctgcaccagatgcccacgtggccggcctcaaggtggcggcttccagggcaattggctttgctgccttgttcaacactttaataaggtgaaaatccattgttgctagcaagatgcaaagaaaaccagaaaaagaccttcctcttctgggctggtattgcctggcacgatgagttggccccctcgtcctcagtgtgctgtgcgtggcatcgcaggtgccctgtggtgcagcaggcatctgaaccctcctggacttgctaacgcacttccatgtgtatgcgcacgcgtttcctttttttcctaggagagggcttgtggcatccagcagattctcctgagggtttgtgacccccccacacccccaaaaagtcaggcacttgttccttgtcacggtcactgtcattgatagcaagaagtatcccggttgttggtaatttagccgtttgcttcctttttctgccccagagggtctgtttcaggggaacagccacacagattttggtaccttcggttattgccctgcctcccagttgtgcgggaagcagttgctccgacactagtggacggagcagaacctgtgccttgtggtctcagcactgggccggactcacctgagagctggtgtggaaaaccagttgcgctaggacctctgcagaaggagtggaacttttgcgttgtttttcttaatgcagcgtcatggatccatcttcctgtggagggaactcttctgtgtgtgatatggagggcacgggtctggagccagtctggggagggctgagggagagctgccctgagcttggttctggaggatgaggtggggtgctcctgggcactctgagaacatggctttgcctggtagcaggacagctggaggtccttctttctgccacagtcagctttcgttgaagctgttttgatgatgagctcctagcttcagagtcaggacccaagcggggctccacgaaaggcctgggcgacccagccactgggcctaagcctgacctgctgcacccctgcctccctccacagttgccgaggtactgtctgaatgccgcctgctcgcctacatatcccaggtgcccacgcagatgtccttcctcttccgcctcatcaacatcatccacgtgcagacgctgacccaggtgagaggccccggcagacacacagcagggaaggtcgattggaaaccacttcctttgtcctggtgcccagcaggtttctgtcccccactccagaagtgcgtctctggagacccagctcttctgaggactgtgctcaggaggaatcagtgtcccattgtacagacagggcctaaggaaggagggctcgcaagtgccctcaggtcacaggctgacttgcaggccagtgctctccccgcctcccccatgtccacgtccctcacaccttctgccctgctgggctttggaatcggacctgaggctgcccaactccctcactgaatagtcatgcagccttcccttctctgagcctcctgcccctcttttctagagtgagggtgatcttagcacctctcagaggtggtctttggttccgttctgaggtgaagcaccaggtgggagtgcatggtgagtggggcagaactctttccccaccgaggcgcgcaggctagtgctgaatggcacttctgaagcgggataaccgccccaacacacgcacccagccctgcctgggacggaccttccggaaggagtgatgcttgagcccaggtctggacagggacaggtgttgttgcctcaggtggggtgggaggtgggcgtggggaagaggaaggtgctcagtcaggaaactggggctgctgggggcccccttcccccagtcctatctcacctctgtgcagggagagctctgtgggtggcccgaggcctggggccactctcctccctgcctgatggctacccaggttcaccaggggccactggggctcccaccagcccctgaccctgtgggcctgtggccttgcaggagaacgtcagctgcctcaacaccagcctggtgatcctgatgctggcccgacggaaagagcggctgcccctgtacctgcggctgctgcagcggatggagcacagcaagaagtaccccggcttcctgctcaacaacttccacaacctgctgcgcttctggcagcagcactacctgcacaaggacaaggacagcacctgcctagagaacgtgagtgccccaccctcaagggggtgatgggtgggccgcggacccagggcctctcagaggggtgtcccggtgctgggcttgacctgggtcctccaggcgccccccagcccctccctctttgcccagagctcctgcatcagcttctcatactggaaggagacagtgtccatcctgttgaacccggaccggcagtcaccctctgctctcgttagctacattgaggagccctacatggacatagacagggacttcactgaggagtgaccttgggccaggcctcgggaggctgctgggccagtgtgggtgagcgtgggtacgatgccacacgccctgccctgttcccgttcctccctgctgctctctgcctgccccaggtctttgggtacaggcttggtgggagggaagtcctagaagcccttggtccccctgggtctgagggccctaggtcatggagagcctcagtccccataatgaggacagggtaccatgcccacctttccttcagaaccctggggcccagggccacccagaggtaagaggacatttagcattagctctgtgtgagctcctgccggtttcttggctgtcagtcagtcccagagtggggaggaagatatgggtgacccccaccccccatctgtgagccaagcctcccttgtccctggcctttggacccaggcaaaggcttctgagccctgggcaggggtggtgggtaccagagaatgctgccttcccccaagcctgcccctctgcctcattttcctgtagctcctctggttctgtttgctcattggccgctgtgttcatccaagggggttctcccagaagtgaggggcctttccctccatcccttggggcacggggcagctgtgcctgccctgcctctgcctgaggcagccgctcctgcctgagcctggacatggggcccttccttgtgttgccaatttattaacagcaaataaaccaattaaatggagactattaaataactttattttaaaaatgactgctgtggacctggcttttgtccctaggactgtgtttttcctcctgaaccccaaagaaaagaatgagaaggaaactggctgtggtgtttattcagggcccagggaaggctgaaggcagcagggggcgatgcagagatggcaggatcggggcaggtggcctcagccagatgtgcaacagcagacattcctctttagagcccagggggtcaggccgtcactccttgtgctgaggagaaagggatagctgagtgagcagtactacctgtcagcccccacagtccccctgcacagagagcaatgcccctgccactcctcaccttggggcccagggcgtcccgggtccgtgcccgcagcttgttggcctgggtttccgccatgtctgcccgctcctccgcatcatccagctcgtgctgggccttgcgatacttggccaggttggtgttggcctgctgctcctgggggcacacacagggccttggttccgcttgggtgactgagatgcttattctggtccctgccccagtccaagaagggagctagctcctcctggttctcaactttgttcctattgccactgtccatcctcaccaataccacagcgggaataaggaagttgggacgcaccaacttcatgtgcctttttgtgcctgccccacccctcagaggcagccccagccttggccaggggaaagcacatggggtctgttccatgagaaggagctaggtctgatctccccagagatgttagaagcttctctcttccctctgggtcactgaccttggagggtggagctgctgctgatgcctcacctggccacagaccctggggcagagctggggtgcccggtccaggtgtccaggccccagcgcactcaccgcctcctcaaactggcgcttgtagctcttgaccttgctctgcagcttgtccaccaggtcctgcatgcgagccaggttctt

SEQ ID NO: 1105 - DNA, 188 bp, Homo sapiens
tctgcgtgatagttcttcaggttcacttcacagattagctgacacttaactgttctggaagctgggccaaggagtgctaacatggaaattgagtaactatagttttttgcccaaggtacaggagaataaatatgagtagatagaatctcttaaattaaaaatttctccagtaaatttttcctaagtct

SEQ ID NO: 1106 - DNA, 17646 bp, Homo sapiens
gtttgtaaatattatctctgtggtttttgtcctgcggaattgttcacaaatacacgttctgatcttggtaagtgaattttctgtgtaacttttatcaaatttatgatatttaaaatgttgaataggagtggtgaaaggaaaaaaactgattataattctgtgaagttttttcttaaagatttgctaataagtaatttcttacttggtttagatatttgaatgtattaataaatgtcagtctgattaaacatggtggcttaattaaacatacatgtctatttccactccctcccaaaactccacttaaatgaaaaaaattttaaaaagatgtatttggaagaggagataacattagagatgtcagcaaatttttggaagatgacaagtggatggaggagtagcagcaaacgcaacagagcagagcaacctgtaccctaaaagcctgcagaaggggatactaaacagaagcgagtgtttgatcagcagaaccctggacaggctcaggatttggaggcaccaggtaccacagaaggcagggttgagtcatggggctgaaaatgagagagattagtctgtagtctagttcagggtttctcaaccttgacattgttgacattttgagccagttttggagggggcttttcatgcattgtgggatgtttagcaacatctctggcctttacccactagataaccagtagcaccccctgttgtgacaccccaaaatgtcttcagacattgccagatgtcccccaggatgcaaaattgccactagtgtaggtggtcctgtgcatctgttgatcttactctcctccccatagaccccaggagaagagagggttattttctggagaaattggactagagagactagtttatctgaaccacaaaatagaaaaaaataattgactatttcctcaattctctcaaggatggtacataaccaggatcattctggatacataaaagaagtcaattcattatgtacaatctttgccttagagcattaggagcatattaaggcaggaccagtctagatcttgagatttcagacacagcaggggcagtagtaagttaaaaaaagaatgtaaaacagagtaaatgaatctatatttttattggtggggctctcctctgccctgttcctagaaggatacagccagatgtttttccccaggcagaagaaaagaggattcttctctagagaaagtgaacagttcctgagaagtgatctctgcaggtactgacccttggggaatctcttaaaagaaagtcttactgcctgattttcctatgataaagcccattcatgagctgacaaaccctgcctaatccctactaacttccagtcagattttggaagtgtctttttaaaaaattagttgcttgccaaggaccaccagccagacgttcgaagaaagccttcaacacaagagattaacaaaaccaacagagaaagaagaatttagtggaattggagataatggggaaagcagaagagagattcttcaaaatcttaagaaatttagtatcttcagagacatatgagaagacactatattcttcagcaataatacgatgccataaagagggaacttgtggaaaaagtgaaaaacattttctgaaaaacagctcttagaaattaaaactgaagaaatagaactaaaatcaccagaaagatttgaaaataaaattaaggaaatttactggaatattgggcagtacgacagaaggatttttaaaaaacttagtccaggaactgtactaccagcttaatagttgtggacagaataaaagcagagggaattgcttaagaaaaaaaatttgcagtactaaaggacattcatctttaggttgagcaggtcctacaagtgatcaggacagtgaatgaaaaagatccatacctaggcatacccctgtgaaattttagaacacgggggtggtgggggtgggtgtaggtcacagaattatgaatcagaatggcctaagactggtcagtaacaacgggggaagttgaagacattggagaaacatcctcagggtgctgagtgaaaatgtgtctgccggagggggaaaaagacattttcagatatacagggtctcaactgatttatctcccacgggccttttctcaggaaactccaccaaaacatgtccataaaccgagaaagaggaaagaaaaaacaagagatccagtaattctcatctactacagagcagaaaaggaattcatcaggacaataattctatagtgagcttagaaaataagtatcccagattgaagtaaggcagaaggcccatggaagaaaatgaaactgatgatgtgatatattttgagtcatatgtgaaattagtattgagatagtttctatagctgagtttgaagtgtttgagaagaatttgaaaatatagagaaaaaactaggctcacacctgtaatcccagcacttttggaggcaaaggagggcagatcactcgaggtgaggagttcaagaacagcttgcccaacagggtgaaatcctgtctctactaaaaatacaaaaaaattacgcaggcatggtggtgggtgcctgtaatcctagctccttggaaggttgaggcaggagaatcccttgaacctggtgggcagaagttgcggtgagccaaaattgcgccgctgcactccggcctgggcgacagagcaagactctatctcaaaaaaaacaaaacaacaacaacaacaacagaaaacatcagaagtgtctcataatgagcctttgtttggcctgacagtgaatagtacttgcataatataagcaccaagtgtttatttatccaaaaattttgatgtctaggattgataaatagcaaaataagcatagaattttaaaaggtggaggtaaattcgggaagaaatagagaagagttaagataattgctttttagaggtgggaagaagtaggggttaggtactagtctagtgctatttgactttatatacagatttgaaaataataaagtcggcaatggttcagttcagtggtctgtccccatcagttttctttagtggcaataaggaacagtttcctttcaccttccctccttttctccctccctcctttacttctcttttaaccatatatggttgctgtccattatattgactttgaagactgagcagatcaattttatatcctatttggttatgatgcttcatgatttagtaggatcagtttagatgtctacaaactactcagtgataaagtgaatcctttttctttttaaaaagaaaaataactctttttttttggcaagaaaaggttgctaataatcacagataatttatacaattatattttttcccccaggtccgtgtgaaaaaattcatgatgaaaatctacgaaaacagtaagttattttgcttgtcatttccacccccccagttattagttggtttaagtgggacaagggttgaggaataattgcaattaaatgtaaaatgagtgtctgagagaagtccagtcagtggctggggatagtaagaaagttctatagcttcagtaatgatactgatagctaccacatgagtgcaccctgtatgtcagactttttttttctgtagcccatttgctgttttttttaaatgagcctcactgtgtcgctcaggctggagtgcagtggcatgatctcagcttactgcaacctccgcctcccaggttcaagggattctcctgcctcaaactcccgagtagttgggattacaggtgcccaccaccatgcctgactaatattttgtatttttagtagagacagggtttcaccatgttggccaggctggtctcaaactgctgacctcaagtgatccacccacctcggcctcccaaagtgctgggattacaggcgtgagccaccatgcccagccccgattttatccatgagacttgtcctaggtccagggtcatagatccagtacagtggtaaagctagtggttaaacccctgtgtaaagctctatgatgaggggcaatcagaaagtcacttcaaatacacctggtttaccctgcagcctaaatggaatagtcgttgaggctagttaagatagaatatttgagttgtaatggctgaagatttggaaatgagtacttgtttattttcatgttaccaggtatgagaagagctctcgtttcatgaaagttggctatgagagagattttttgcgatacttacagagcttacttgcagaagtagaacgtaggatcagacgaggccatgctcgtttggcattatctcaaaaccagcagtcttctggggtaagtgaagtcaattcagtctttgtaaacggtccttgttttctggagattcagagacctccctaatatttttgaaacttgtcttctgttcattactttgttctttaaaatgatatgaaacttatagggcattcattttttttccagtctttattagcaaacataacactgattttgctaaccataagatttttctttgtttttatttttcttgaggccaagatttttcccttaaatagtagtaactgacaatatgtgattgaccaacagaagttgaagataattgaattactatcctttcaattaagcattttaattattaaatagaaatattatgtatggtatgtgcaagtttgcatgtttatctttgttttcaacttgttggtaatacgttttattgtcttcaataggccgctggcccaacaggcaaaaatgaagaaaaaattcaggttctaacagacaaaattgatgtacttctgcaacaggtgagaattgtgtgcattaatgtcaggaagtaatgtgaaacagacatgtaaccagcaaaaatacaaggatgggccaggcatggtaactcatgtgtataatcccagcactttgggaggccgaggcgggaggattgcttgagccggagaatttgagaccagtctgggcaacaaagtgagacccagtctttacaaaaattagccaggtgcaatggcgtgtacctgtggtcccagctacacacgaggctgagttaggagaattgcttaagcctacaagggcgaggctgtagttagacgtgtctgtgccactgcactccagcttgggcaacagagtgagacctcgtcttgtgtgtgtgtgtgtgtgtacatgtacatatatatgtatctgaaaggacagcaaatatgaaaagacgctcaacactattagtcgttagggaaatacagattaaaactgcaatcaaatacctatttgacacctatgagaatagctaaaattaaactgatcataccagctattggcaaggatgtgagccagctggaactggggtataatattgcacaaccactttggaaaaaatagtctcatttttttctttcatattcctgtagatgatattggagtctgttttgttgtcgttgttactgtttttttgacagtcttgctttgtcacccatgctggagtgcagtggtgcgatctcagctcactgcaacctctgcctcccaggttcaaatgattctcctgcctcagcctcccgagtagctgggattacaggtgtgcgccaccatccccggctgattgttgtatttttaatagagatggggtttcaccgtgctggccaagctggtctcaaattcctgacctcaagtaatccgcccaccttggcttcccaaagtgttgagattacaggtgtaagccactgtgcctggccctggagtctcttaaaaagttaaaaatgtaccatatgccattctactcccaaatatttatccaagagaaatgaaaacatatgtctacacaaagatttacactccagtgttcatgagtgctatattcataatggcacaaaaaaaataaaacccagactggaatcaattaaaatacccatcagcaggtgagtggataattaaatcatgatgtatctatatggtggaatgcctgtcagtaataaaagggaattagctacatgagacaatatgggtggatcttaaaataattaggctgagtgaaagaagccggacaaaaaaggaatatagactctatgactctatataaaattttagaaaatgcatattaacctacagtgacagaaagcagatctgtggttgcctggggattgtgtttaggattcaggctggaggaggtactgaaaagagtaggtggctcacacctgtaatcccagcactttgggaggattgcttgagcccagcagttcaaaaccagcctgggcaacatagtgagacgctgtctttccttttttttaaaaaaaaaaacagagtctcacgtcatcatccaggctggagtgcagtggcacgatcttggctcactgcagcctcctcctcctgggttcaagcaattcttctgcctcagtctccccagtagctgggattacaggtgcccaccaccatgcctggctaattttttttttttatatttttagtagagatggggtttcaccatgttggccaggctggtcttgaattcctgacctcaggtgatctgcccaccttggcctcccaaagtgcttggattacaggcatgagccatcgcgtctggccgaaagtgcatttttcttaacacatcagttatactttattgaagtataaaaaaaatccaggataaattaaacccaaagaggcttttgtaaatgaaaccaaacaaaaaagatggaaaacaaccactaatgaaccatggggaaaaaagacaatagttgggtttgaaagaaatcttaactgtttttttcccctactcttctaagattgaagaattagggtctgaaggaaaagtagaagaagcccaggggatgatgaaattagttgagcaattaaaagaagagagagaactgctaaggtccacaacgtcggtgagtaaaccttatttcacattatctcatctgtctgttaacagttagtaggaactcatttttatttgagaacctttgaaaactgatgttccaaacttagagtcagcacaatttgtagcccacaaggtctgtggcatctactaagctctgcctttgtgcagtatgcaagcaactttatatagtacaagaaacaaatgggtgtggttgtatcccaataaaatgttagcaaaaggcctctctggcttgccaatcactgccttaaaccataaattttcatatgagcctggttttattttcatttttgttgtaataaattactcagtacatacttacatctttgttaaaaattaatacacccttaaatatctaattcttttaattggagaatagaatatacttgtttcagatactattgattgcagaatgtaattggtcattggttcctccatattgaataggatatgttcagattatagtcaatgtgcttagttccttaattagttttgtatatggacattattccttgaacctaagcaaggaatgtattcatactaaaataggtggctttctgaaaggtgatttaaattttgtaaggtaatgtgggtgttgaacattgaacagtgggtctcaacatttcttctggatgattcagtaagttagttgctgttaccttaaacatccctctctaaaagttgaccacttgtagtccaatattactgatttggggaaatggaaaagagcaattcacacacattagaaatcttttctaaatgttgagtactttcctgggatttgtttctcttcctcagatgttcttaaaataactgatttatcattttagacaattgaaagctttgctgcacaagaaaaacaaatggaagtttgtgaagtatgtggagcctttttaatagtaggagatgcccagtcccgggtagatgaccatttgatgggaaaacaacacatgggctatgccaaaattaaagctactgtagaagaattaaaagtaagtttttttgtttgttttgaggcagattcttgctctgtcacctagagtgcagtgacgcgatctcagctcactgccacctccacctcccaggtttaagcaattctcatgcctcagcctcctgagtagctgggagtacaggcatgtgccaccaggcctggctaatttttgtttgtttgtttgtttgtttatttttgagacagtctcgctttgttacccaggctgaagtacagtggcgtgatctcggctcaccgcaacctccacctctggggttcaagcaattctcatgcctcagcttcctgagtagctgggattacaggcacacactaccacgcccggctgatttttgtattttttttaatagagacggggttttttcctgttggccaggctggtcttgaactcctgcctcaggtgatccgtcctcctcagcctcccaaagtgctgagccactgcgctcggccagcgtaaatttcttctaaagatacattttagctattaaaaaaatctattttagctatagctacagcttttagctatcagtagctatagataaaaataactatattctaatatggcttaaatggagatatgaccctctcattgatattttcctatgtgtaattatttttgaagcattgtgagttctgtgaaattttgctatttattgaactatgaaagcacttgattttcttaactcttgagtgccagaaatttgggaagaatattcctgaggattagacaaataatgataccttgtgtatatacatggtgttggaatgtctacatttcccttaagggcatcaattccataagttggtctacagataacttcacattagttgaccattgtttaacaatgctttaaagttacatttgcataagaatccaacttgatttttctaggaaaagttaaggaaaagaaccgaagaacctgatcgtgatgagcgtctaaaaaaggagaagcaagaaagagaagaaagagaaaaagaacgggagagagaaagggaagaaagagaaaggaaaagacgaagggaagaggaagaaagagaaaaagaaagggctcgtgacagagaaagaagaaagagaagtcgttcacgaagtagacactcaagccgaacatcagacagaagatgcagcaggtctcgggaccacaaaaggtcacgaagtagagaaagaaggcggagcaggtatatataaaacaccctaagactgtccagctcataatgggtgtgcaataacaataataactactagtattattccttggaatggtacttgggaagctcttaagcatctttaagtgataggatgggttgcgagagcggaatcagtgaataaaatagttccatcttcggggcaacttctgtgccatttcccacctgtctaggaaatttcacccaacctttttacaaagttagagtacctgatggtctcttaagtgcttgtctcactgattccgagaaataaaatatgaaatcagccatactgttttaattataattacaaattgaagaagagtcttaaagagcacaacgataaccatcttagcactattggagatgaatttagaaagattttcaataatttttagttcttaagatttctaatgtaaatatgttttagagggtaagttttgcctagtcttgttaattaatagcatctactccaaggcctttacttattgtaatactggctgaagttgccttttggttttaaattattaagaagtagagatcgacgaagaagcagaagccatgatcgatcagaaagaaaacacagatctcgaagtcgggatcgaagaagatcaaaaagccgggatcgaaagtcatataagcacaggagcaaaagtcgggacagagaacaagatagaaaatccaaggagaaaggttagtttatatgagaattcagttcattaagaaacttttcacaccctaatcgccccactcacttttctccagacacaggcaaagatccatttcatacatactccttttcactttgaggaatgccattcagtaggagacaggcattctttccccctctcctacttagatttgtgaaaatgacagtttatctggtgttttcttagatgttaaaaacatctttcagttgataaacctgaaggtttttaatgtagcttcttttaagtgttatattacctttcggggttattaggtgtaggatttattatattaccttggttattggctccttttttttttacacactgcagtgtttcataatacgtcttataaagtgagtgtacattgttgcattaatcttcatttgtagcattcatttaagttagtaattaacatctaagtacctagaagttgaattgcttacatgtgtcttacccacgttttcaatgggatcaacatgctctttcccctttactttttcttttttctttttctttttttttttttttggtgtggcatcccagtagctgatttactgtgctgttggcactattaatggactttttaatttgtgtggcatgttttcacaagaatattctcatctaacttagcctttattggaagataattctgttaaccaccagggtctcctttctgagtttcatgttcttctattttgtattttttatataaaagatataaaatatcttttattttgtattgaatgagctgttgtgctttgcatggttttaggaatgagagaaggggcctatttctgattttctcagctctccttgtttcatttcattctacctgtctccatgtttaatcaccagcataatatatgtgctactattaaggtttattatactagtcttttgtgtgttgtttgtttattatatcctttaatagaactgtcctggttttttgttttcgtttttcctctagactcagctagaactagcagcacaaaccatggacatattttttggtctctgcttttattttcttaaaataagcacacactctttttctgaaatatttaacatctattggcttttactgtaatgtgagaaagtgttgaaaacttttgtcttcctgccagatgtgctagtgtttgccattcaagttgagaacttgcttctgattcaaaaggcagttgctacaaagggttaactgatttaacattagatttaagaatgttttacctaatctttttgcaagactttctgtgtaatgtctttttgggttgagaggtcaactcttaagagccaggtatgactgtcaggtcaaattaataatatttgttttgagaaagtttttagttttacatttcctattgttagctttagttgctctattctgtgttatcatttgtgccacttaaaattgttgggttggttcttagggataaaagctagctagccttcataactacttgaagtcaaagttgagtagtaaatgacactggcctgactaaaaacaggcatatttgtgtaatttctggatagagcaaaaagatgtccagagttgcttacctttaatcctaaaattgtaatgatgatgacatgaaatttagtgaaacttttttttttttccagacagggtctcagtgtcacccaggctgagtgcagtggcacgatcacagctcactgcagcctctacctccccggcccaggtgatcctcccacctcagcctcctgggtggctgggactgtaggtgcatactaccatgcttggctaattttttttttttttttgggggggtagagatggggttttgccatgttgtccagtgtgatctcgatctcctgggttcaagcaatcctcctgcctcagtctcctaaagtgctggggttataggtgtaagccaccatgcctggcccctagtaaaacttttcgttaagcggaataagctgagttacgtttagattagcaacagacagggattttccatgtgagacttggtgcaaagagagaagttactaagaaaactgtatcaggcttgtctcccatgattgggtatgctatgatagagttaaacattggaatctcttttagaagtgatataatttattggcattttgaaaatgctatgtaaaaataaattaattaaaatcagtgtgcagatgagtgaatttaaaaaatgtaaaaaaaaaaatacagaaaagaaactaccatgtagccatctaggcactcttataaatgactgaagatctggactttgggaccaggtgtgagccacagtgggcatttattaatggcaaatgagaaaaagcaagtttattactccaggtgctatgatagaagcagtttatcttactccacaaatgaaaagtggtttctcacacaaagctgtcagcaaccagtgtaaggtgctctctttgtcaagagagtttccttttttcatccatagccctaaaatccaccacaaattgtggatgtccttaggactattaagatctaccatatttacatagggcagaagataagattattggactgactactagtcctctacgggacaacaagacgactcttcctcattgaagctacctgtgcaccggagaagcccataaggcacaaagggaggactttcccacaaggtcagttagagcccactgtcctggcacagttctcacaagtggacagacagacatgaagcaagtcttgcgcttaactacttggacattgctttgtgtattatgcaagtgttacggactaaatatgctcttttacataagatcttcagttctctgagtgggtgcccctcccataccatgttttgtttttcattaccatctctttcctagatatttggtgttacgtcttcataactgtgcagaaactatgtagagggttctgtttctcttaaaatgtctttttgtctaattaactactctgccagaccagctattcttagtaaggggaaaagtaatttttccagaaagtttctagttggctttaacattttctgtagaaattttttgttgggggaatacttggaactgaaaaggctagactatgcttgctctggtgtactacttttacctctagtctgaggtcttacccatccaaagaatagtagaggaaaaagttgtttacctttttcattcttcatttgcagctgagttgaattttaatttctctttttggaaaaacaactctcagatggcatatatattacttttcttagcaaagcacaaaagttcagttgcttagattgggatttaagatccattttctttgattaggcttatccttcttggatattcaaatatatataaaaataatgttttgcattgaaaaatatgtagttgtagtttttaaaacatgcctgttataaacattcaactttttttcaccttttggggtctccatttttacccttctaacttaataattgaacctcatgtgaacatagttttgtatgctgtcttttatacctttcccagtgctttttgatgttttttacccacaatgaaatttacttaaatattatattctgcaatgtgcttaatagcttctcaccaattgagagaatttacccactattttaccttttgcttccttgaattccccttcctgccttctctctcatatattacaaattttatccctttggtaaattcaccaaaccgttgcttgcagtctgtgggaaatgattgtctctcatctctcagttgtttcactttttttcaaaatcatgtctttattgtattttactttaaaatccatggtcaatgtcttcttttatggcagaaaagaggggatctgatgataaaaaaagtagtgtgaagtccggtagtcgagaaaagcagagtgaagacacaaacactgaatcgaaggaaagtgatactaagaatgaggtcaatgggaccagtgaagacattaaatctgaaggtgacactcagtccaattaaaactgatctgataagacctcagatcagacagaggtaagtgtattgtttctcactttgattagggctttttgttactgtttgacagtgcagcgtaagtatgcacagatgaagatggaactaagccgagtaagaagacatacaaaagcctcttctgaaggaaaagacagtgtagtcctgcaaaacattttgaggtacattgttttgtctcagctattttgtagcagactcgtgcccccattagtgtgcctctttggaaattatcgcccacatttgtaatatagtcgccattgaaaagttaattatcctttttttagggattttgatgtcatttcttttttttttttaataaaaaggttgaactgtttttttttttctttttggtattaagtccatcttgtgttggtacattggcagagacatatgctttaaaaacttaaatatttcggaggcacatgttggactactttgttttaattaaactgctagtatttctttgtcaaggatgtttctagttttttgctttattgccttgcattctaatgcagtttgttctgtaactcgagagccagtagcattggattgatggaagtgtagggtttatgaattattgcagctgactaccatacctcacacagcgttggtgttgtgagcggcccatgaaaagccaaattaaaaatcaaggattcagtcaaactaagcaggtactcatgccaggtactcctttctctacccacatccatgtttgaatgctattgcctgtgatctttacgcttaactgttgtgtatcttttttgttctttacaagaagtgcagaggggttttttgtgtattgcgtgaaaacttataaaacaaatgttaacagaatggaattttttttcaactgtatgtagggctgcagtggtggccagaattagatatctttaaagaattttaaatacaataaacacttcatattattcgccttgttacactcaatgcaattctcaagtctataagaggtatgtgcttaatatttcctactgtgtaggagaatttgcagtcagccataggtatgtaggaatagtcactcactggctgatacatttaaagcagcagtgtgaatagcaaggacagacaccttcaatttgtgaaatcaaagaactgatgcactatatagaacgaatttgggtttttaaagaaatattaaaagttaggtactgtaagtgttcttaaaacctgtaaacttcattctgtgggctagtggtgtgggacaaaatattcctaatgaaaggaagtaccaattagttgatttgttggtggcattccccttttgggaaagcaatgtaaggttatgtctgtgtatgtcattcacacttaggcaagcatacacaggcacatggctttaagaaccacactgatgccttgataattaaaaagaatacaagcattccatgtacacatgttaattagcagttagtgactgggccaacactttctcataaaaattggccttttacatgttgtctaattatcatttttccccaaattttgcgttgtaggactactgttcgaagatttttggaagaatactgagaacggcataaagtgaagatcgacatttaaaaaatgaggtgaaagaaagctatagtggcatagaaaaagtataaagctcagttagtttttttattattattattattaaaagttaattcaggactgatgtgacctaccagatttcagaacatgtgttaatagtatatatgccactgaaaacttaggtcctgtatcatacttttttctttaagactttttaagaaatattacttaaacatgtggcttgctcagtgtttaattgcaagttttcaatcttggactttgaaaacaggattaaacgttagtattcgtgtgaatcagactaagtgggatttcatttttacaactctgctctacttagcctttggatttagaagtaaaaataaagtatctctgactttctgttacaaagttgattgtctctgtcattgaaaagttttagtattaatctttttctaataaagttattgactctgaactagtcccctgttttaaatacaagagttacactattactagaggtgttggtgtacagttttatctgatttgttctgtttaagactaatttttatagactttctaatgttttaaataatggtgcttcaattttaggtggttatgaataaatttgaattttgcttttaatagcaaagatgtgcagtgaactagaatatatttttacatccctgagagattcatttagtagaaaattccaagtatcctgacaagcactctttagctggctagctatgggatgatgtagaaaagcattcaagagctagtttttgttaagtcctgtatcaagattaacccagctgtgtcagtttataaatgtatttgtgtatagggtgtgtagtatatatggcaagggttttttccccccacttaagtgattatttttgtgtcacatctaggaaaaccggcagcatgtttctatctatagccagcttcttcgactgtataaaagtattctctccagctacgtatatacacacatacatatatatcatagcaattccttgtggtttataacttgcaaatactgctatcagtttataggtaaagaaacagtgtgttaaatgacttatccagggagggtcctgtggcttcatgtttatggagttgctaggtctctgcctcatggtccagtgcctgttaagccactgtgttcattctaataggcataatgaattgttaaagaatttactaaaatctcttccaccaaactttgaaaaataatgaagccgcccccactttagaggctctgtatgaaaaaatgctgtggagacagagccctcctggctccctagctgatcctggagatgcagcaatagatgaatgggttatctctgaatttgtaagagataattcacatgaggattaagataaaatgggaagtaaaatctaacaaacacaaagatagctcccaggcactgctttgtgtagtttgacagcattgtggttgtagcagcaaaggacttaaagtgatagtttttaaaccatattctgtccctaagtaataaaaaatctaggaagttactaaaataccagatttgttctgctctgcctcatctagaatcaacgtctaactaacttaaatgaagtataataaatgagttcatatgaaaaggcttcctctatggacacttagatatattgtaactattgaagttacctgggatgtgggggtggtgggaggaggacctgcctccccaggacatctatgactaaggcctggctttagttatggagagagacgtagaagttgaattttacacccaaaattgatgtgactgaagaggaactgattgttgctaaccagctcacaagaatccagtattgagaccagttcactagaagaaacaaacatttctgccatgcagaccaaaaagttattagttggtgaatatgtattttctctttggaaggtctttaaggggagcaaaccagttttaatcaatcagattgcttggtaagtttggaatctgcaatcagttggtcttaaaaaaaaaaaaactttattttggaaatttaaagacatacacaaaagaggaacaatataattaacctctgttaactcatcaccaacaagactcatgaccacttttatacttcatgagtgattgtatttgtatccactgttttctattattttcgagcaagtctcagacacaccatttaatctgtaaataattcagcatgtatctctaaaagacaaagacctcttaaataacagttcattagtataaaacaaattgggtaaacttttgttggtcatcaaactatattagcactggtccaatagtttaattttcattgagcctttcaagaggaccgaccagtctgctgctcaagacatcctctcctctgga

SEQ ID NO: 1107 - DNA, 1466 bp, Homo sapiens
attctgtgggatgggacttcatgcaggattggttttcaagtttgatttcctgagggattttttagttgtttgtgaaagaaccccaggtctacttttgaaattttgtattataattgtaatgttgcccatggttaaaaaaaaaaagtgttcagtgatctatgtctcctactactcctatttctctgtttttcctctgcaggagcttgctgctgttaacagttattcttccaagttgttttctttgtggggagatgggaggtgggaggaaatataaacatatatgtatagatctttcaaaatatatgacggtatacccgtatgttctgagtcttgctgtttttacctggtaatatttagaaacatttattttgagataaaggagagcacttttaagttgaacctgtagttttaaaaagtacatttcaagtaagccaaagcagagaagtaaatgtatttttcattgttgtatcagaattttgaatttactattttaaaaattcaagagttttgtagctgatctatttcttcccctcagccatcccaaataggtcatttgtcaacagatttaagaatgtttagaaacaacaactttgggaaacgggaaacaatttggtataagtgggtgtgccataacctctctcgtagccattcattcccggatacataccctagagaaactcttacacatgcgtaccaggggatggatttaagcatttgtgtgtaataggaagaaaagaagaaaaaacccgggaagatcccaagtgtccaccaacagtgtgttggataaatactgtggtatattccaacagtggaattccacagaagtgaaactgaactgcagctgtgtatgtgaacatggacaaaactcaacaatagaaggatcaaaaaaagcaagtcacagaagaatacatcactatggttccatttcaatgaaagtcaaaaacaggctgtcaaatacatgataaaaggaaacgattaagacaaaatttaatgttagccgttttgatggagggagaggtgatcatgagggcacaggggtcttcagaagaactggtgagggtctgtttctgaagcctgtgggcatttccttttttaatctgtatgtttatgtgcttttgtatgtatgatatttcttaataaaatttaaaaagaagaatgggaaaaaagtcttggtgtaggtagttactaatatataagctgtagtgtatttcgtaaaattaaccatcagtcagtgacaaatttaaagatgctgtttcttgagtgcccaatttaaggttttattttgtttgagacagggtctctgtcttgtcacccaggctggagtgcagtggcacgagctcagctcactgcatctttcgcctcctgggttcaagccattctcgtgcctcagcctcccaagtagctgggattacagcttcgcaccaccacacctggctcatttttttgtatttttagtagagtgtttc

SEQ ID NO: 1108 - DNA, 4226 bp, Homo sapiens
tacctcattaatggatctgtcctttttcttttctaaccacttccttatgttacttctgaaatctagtgaggctctgtggtgtctgactttccctggctgcttctttagttttgtctccttttccaggctcaacagcgtgctgatggaagtggaagagcctgaagtcttgcaggactcactggatagatgttattcgactccatcaatgtactttgaactacctgactcattccagcactacagaagtgtgttttactcatttgaggaacagcacatcacctttgcccttgacatggacaatagcttttttactttgacggtgacaagtctccacctggtcttccagatgggagtcatattcccacaataagcagcccttactaagccgagaggtgtcattcctgcaggcaggacctataggcacctgaagatttgaatgaaactatagttccatttggaagcccagacataggatgggtcagtgggcatggctctattcctattctcagagcatgccagtggcaacctgtgctcagtctgaagacaatggacccacgttaggtgtgacacattcacataactgtgcagcacatgccgggagtgatcagccggacattttaatttgaaccatgtatctctgggtagctacaaaattcctcagggatttcattttgcaggcatgtctctgagcttctatacctactcaaggtcagtgtcatctttgtgtttagttcatccaaaggtgttaccctggtttcaatgaacctaacctcattatttgtgtcttcagtgttggcttgttttagctgatccatctgtaacacaggagggatccttggctgaggattgtatttcagaaccaccaactgctcttgacaattgttaacccgctaggctcctttggttagagaagccacagtccttcagcctccaattggtgtcagtacttaggaagaccacagctagatggacaaacagcattgggaggccttagccctgctcctctcaattccatcctgtagagaacaggagtcaggagccgctggcaggagacagcatgtcacccaggactctgccggtgcagaatatgagcaatgccatgttcttgcagaaaacgcttagcctgagtttcataggaggtaatcaccagacaactgcagaatgtagaacactgagcaggacaactgacctgtctccttcacatagtccatatcaccacaaatcacacaacaaaaaggagaagagatattttgggttgaaaaaaagtaaaaagataatgtagctgcatttctttagttattttgaaccccaaatatttcctcatctttttgttgttgtcattgatggtggtgacatggacttgtttatagaggacaggtcagctctctggctcaatgatctacattctgaagttgtctgaaaatgtcttcatgattaaattcagcctaaactttttgctgggaacactgcagagacaatgctgtgagtttccaacctcagcccatctgcgggcagagaaggtctagtttgtccatcaccattatgatatcaggactggttacttggttaaggaggggtctaggagatctgtcccttttagagacaccttacttataatgaagtacttgggaaagcggttttcaagagtataaatatcctgtattctaatgatcatcctctaaacattttatcatttattaatcatccctgcctgtgtctattattatatacatatctctacgctgcaaattttgggtctcaatttttactgtgcctttgtttttactagtgtctgctgttgcaaaaagaagaaaacattctctgcctgagttttaatttttgtccaaagttaattttaatctatactttttaaaaccttttgcctatcactctggacttttggattgttttttacattcagtgttataatatttgattatgctgattggttttggtgggtactgatgtgaattaataaaaacatttcatttccatgtttattttctaatctcttccacattgtaggctatgtttaccatacgtagcagaatgtatttacatttcttggttctagtcatttgtattcttcgtgagtgtgtgtgtgtgtgtgtctgtgtgtgtgtctgtgtgtgcctttggcatttaggaagggttgtatagctcatgttaaatattgcactaaaaatgtttttgatggttttcctccctttgaactagacacacttctaatatttggtttatagttttaaattataactttcagcatcaaatatttccatacaacagtcaattacatgatgtgttttctttttcctacctcctttacctgccacttctcataatagtatttgaacctaaacatataccggtgacattctgtgattatcatcctgcccctaccttggtttttatccattgtggtttagatccataatgaaatatattaacgctcatgagctattcaaaagtgaatgtcacagtcatcacttgctgagtggtactcatccttaacagagtcctcatgagggaatcaggtctcgctgagtttagcatgtttaataatcttttctcacggtctcgatacatggatcacattactagatataaggtgcttgtccaaaatgatttttctggagcttttaggagatattgtcatccttgggggacatacatggtgtatgttctcattgtgggattctattttgttctaccaggacctctaatttctgccagttacttcattcatttgttctcttcaccatgagtctccagaggatacttgcatggtccgtgcctgcccatctgccagcaattctgcatttccaagattggcacctctggtcctctgcacggtgaagccccttcctttcaattccccagtagccagtgctctaatccaccaggtctcaggcatgatctatgtttctccacactcgctttctgaggagagttttgcctgggttctatcatgaacaggccctccctgctgtcctggcctctatttgcatagtgtttcctgctccctctgccgtcgtgtggctcccagacctggctaaagaaaatcacctgagggccacagtgttccctagccctggtgtttagggcaggattatgggtgagatttttgagtctctaagttgacccctacggctctgaagtgtaagttgagaaattcagctgttatcatcctaggtggacttgctccctcctatcctcctacttcaaatgcagaacttcaatcgtttacaaaagaagactgaatcgtataatagaacacacccttattcattggctggcttcaccaatcatctcatggctgaacttgtaaaaatacaatcttagccacatacctatgaaatgtatgtgtgtgtatatatatgcatgaatttgcttctgagattatggaggctgaaattcccaagatggaaggaaagctggatatccaggaaagcatttgtttcccattaggcctcttaattctctcctggcccttgattgattgcatgaggcccacccctattaaggagggcaatctgcttcacttagtctgcccatcccaatgttaatcgtatctgaaagactctctggaacacaaccagaatcatgtttggccaaatgtcctggcaccctggtgctcggtcacagtgacaactacaagtaactatcacacatgccctttgtcatattggtgatttccactgtttttctcccaaactgcagcttatatttgttctcttaatactgttgagcaaaaacttttaatttttataaagtcgaatttatcaatgttttctttaatggtttgtgtttattgataataaagaacactttgcctaactctgtgtcatgaagattttgtcttatattttctgctatactttttctagttttatagtttatatttagttgcataatccattttgagttagtttttgagttagtattgaggttcaggtgaatttttttcctttgggtataaaaaaaacaaattgtgtaaaaaaagttgtttctacacaatttgttgacaagagaatgccttctccactgaatcatatttgcacctttgtcaatccattgggtggttgagactggtgagaggactgtcctggtgtttggacagagagacagggcatgaagtagggtggttcttatgggaaaaattaaggaagacacatttttgcatgaggaataggaaatccccaagcacaattgggggtaccctctac

SEQ ID NO: 1109 - DNA, 6753 bp, Homo sapiens
agttttcctcctaagaaatcttgtgggcattttttttgaactgatgggaacaataaggcataactgtttgcacaaacttgggataaatgattttgggataacgatctaccagaatagggatatttcacccttggttctgagatgcaaaccaaagaatatcatgaccagctttcaggcctcctgaagtatatccctcaaattgtcctgttctcatgctgaggagcctgagatccctgtgtggggattagacagtggactgttatgggtgtaggtgaattggcttattttgtctgtccctgcctgaatgtattgcaggaattaaaaaggaccaagaagaggaagaagaccaaggcccaccatgccccaggtaactgagcaattgtgaacagctacttctgtgttgacatctggagactcctggttcagggaaaatagagcgggccgacattatcgattacatcttttcaaccaagcctgaattattcctactaacattgctgttggttttcattgcagtagatatttaggtttccatttcttcctccccttatcatttactaacctactgcaggtggaccagacttcaaaaactgtattctcatggtgactgcatggaaacttgagcacattttatggaaaattattgagcacagtcttcatgatcactgtatgctgtgtgtcctgagggcactaactcagagtgtcctgttactccctcatcagtgtgtcacctggacaattcactgagctcgttttctctctctctctctctctttctctctcagtgtgtgcgtgtgtctttgtgtgtgtgtttgtgtgtgtgtgtgtgtgtgtgtgtgtctgtctttctctttcattcttttccatttggccctgttctgtcccaacatgaaggcaataatttgttacctcattaatggatctatccttttacttttttaaccacttccttatgctacccatgaaacctagttggggctctgttgtgtctgatttcccctggcttattctttactttttcctccttttccaggctcagcagggagctgctggaggtagtagagcctgaagtcttgcaggactcactggatagatgttattcaactccttccagttgtcttgaacagcctgactcctgccagccctacagaagttccttttatgcattggaggaaaaacatgttggcttttctcttgacgtgggaggtgagtacgtttctatgaaggtgataaggatccactgagtcttccatataaagatcatattcctgctccaagtggccattactgagctgagagatgtcattgccgcagtgaggacctataggcacatgtaggttgaatgaaactctagttctacctggaagcccagacatgggatgggtcagtgagcatggctctcttcctagtctcaggccatgcctgtggcactctgattctactctcatgacattggacctgggcagatgtgacaaattcagagaactatgattttgactcaagggtttgtagatttcctttttcactctaatttcagtgtctggagtcctcacaaccatgaacaatctgagtatttgatgagacagggctaaatattgcagtttttctcctagaaatcatttgagggtatttgctttaaattgattggaaaaataaggcataactgtttgcacaaacttgggacaaatgatattgggataacgatctactagaatagggacattttacccagagtttctgggagaaaaaccgaggaatttctatcacgaccagccttcaggcctcctgaaatatatctctcacagtgtcctattcttatgctgaggagcctgaggtccctgtgtgaggattagacagtggattgttatgtgtgtaggggaatcagcttaatgtgtctgtccatgtctgaatttattgcagaaattgaaaagaaggggaaggggaagaaaagaaggggaagaagatcaaagaagaaaagaagaaggggaagaaaagaaggggaagaagatcaaaacccaccatgccccaggtaactttcagcaattgtggatgcttaattctgtgttaacacctggaggcaacagattcagggaaaccagagtgtgtttgatgtcatgttttcaacgaaggctgaattactcctactgtcattgctgttggttttcattgcagtagatgtttaggtttccatttcttcctccccttatcatttagtaacgtaccataggttgaccatacttcaaaagctgtactctcatggccactgcatcgaattttgagcatattttatggaaaactattgagctcactcttttcatgatcacagtttgctgtgtgtcatgagggcactaactcagagtgtcctttgactcccttaccagtatgtcacctggccaattcactagctcactttctctctgtctctgtctctgtctctgtctctgtctctgtctctctctctctgtctttctctttcattgttttctacctggccctgttctatcccaacataaaggcaataatttgttacctcattaatggatctgtcctttttcttttgtaaccacttccttatgttacttctgaaatctagtgaggctctgtggtgtctgactttccctggctgcttctttagttttgtctccttttccaggctcaacagcgtgctgatggaagtggaagagcctgaagtcttgcaggactcactggatagatgttattcgactccatcaatgtactttgaactacctgactcattccagcactacagaagtgtgttttactcatttgaggaacagcacatcacctttgcccttgacatggacaatagcttttttactttgacggtgacaagtctccacctggtcttccagatgggagtcatattcccacaataagcagcccttactaagccgagaggtgtcattcctgcaggcaggacctataggcacctgaagatttgaatgaaactatagttccatttggaagcccagacataggatgggtcagtgggcatggctctattcctattctcagagcatgccagtggcaacctgtgctcagtctgaagacaatggacccacgttaggtgtgacacgttcacataactgtgcagcacatgccgggagtgatcagccggacattttaatttgaaccatgtatctctgggtagctacaaaattcctcagggatttcattttgcaggcatgtctctgagcttctatacctactcaaggtcagtgtcatctttgtgtttagttcatccaaaggtgttaccctggtttcaatgaacctaacctcattatttgtgtcttcagtgttggcttgttttagctgatccatctgtaacacaggagggatccttggctgaggattgtatttcagaaccaccaactgctcttgacaattgttaacccgctaggctcctttggttagagaagccacagtccttcagcctccaattggtgtcagtacttaggaagaccacagctagatggacaaacagcattgggaggccttagccctgctcctctcaattccatcctgtagagaacaggagtcaggagccgctggcaggagacagcatgtcacccaggactctgccggtgcagaatatgagcaatgccatgttcttgcagaaaacgcttagcctgagtttcataggaggtaatcaccagacaactgcagaatgtagaacactgagcaggacaactgacctgtctccttcacatagtccatatcaccacaaatcacacaacaaaaaggagaagagatattttgggttgaaaaaaagtaaaaagataattagctgcatttctttagttattttgaaccccaaatatttcctcatctttttgttgttgtcattgatggtggtgacatggacttgtttatagaggacaggtcagctctctggctcaatgatctacattctgaagttgtctgaaaatgtcttcatgattaaattcagcctaaactttttgctgggaacactgcagagacaatgctgtgagtttccaacctcagcccatctgcgggcagagaaggtctagtttgtccatcaccattatgatatcaggactggttacttggttaaggaggggtctaggagatctgtcccttttagagacaccttacttataatgaagtacttgggaaagcggttttcaagagtataaatatcctgtattctaatgatcatcctctaaacattttatcatttattaatcctccctgcctgtgtctattattatatacatatctctacgctgcaaattttgggtctcaatttttactgtgcctttgtttttactagtgtctgctgttgcaaaaagaagaaaacattctctgcctgagttttaatttttgtccaaagttaattttaatctatacaattaaaaccttttgcctatcactctggacttttggattgttttttacattcagtgttataatatttgattatgctgattggttttggtgggtactgatgtgaattaataaaaacatttcatttccatgtttattttctaatctcttccacattgtaggctatgtttaccatacgtagcagaatgtatttacatttcttggttctagtcatttgtattcttcgtgagtgtgtgtgtgtgtgtgtctgtgtgtgtgtctgtgtgtgcctttggcatttaggaagggttgtatagctcatgttaaatattgcactaaaaatgtttttgatggttttcctccctttgaactagacacacttctaatatttggtttatagttttaaattataactttcagcatcaaatatttccatacaacagtcaattacatgatgtgttttctttttcctacctcctttacctgccacttctcataatagtatttgaacctaaacatataccggtgacattctgtgattatcatcctgcccctaccttggtttttatccattgtggtttagatccataatgaaatatattaacgctcatgagctattcaaaagtgaatgtcacagtcatcacttgctgagtggtactcatccttaacagagtcctcatgagggaatcaggtctcgctgagtttagcatgtttaataatcttttctcacggtctcgatacatggatcacattactagatataaggtgcttgtccaaaatgatttttctggagcttttaggagatattgtcatccttgggggacatacatggtgtatgttctcattgtgggattctattttgttctaccaggacctctaatttctgccagttacttcattcatttgttctcttcaccatgagtctccagaggatacttccatggtccgtgcctccccatctcccagcaattctgcatttccaagattggcacctctggtcctctgcacggtgaagccccttcctttcaattccccagtagccagtgctctaatccaccaggtctcaggcatgatctatgtttctccacactcgctttctgaggagagttttgcctgggttctatcatgaacaggccctccctgctgtcctggcctctatttgcatagtgtttcctgctccctctgccgtcgtgtggctcccagacctggctaaagaaaatcacctgagggccacagtgttccctagccctggtgtttagggcaggattatgggtgagatttttgagtctctaagttgacccctacggctctgaagtgtaagttgagaaattcagctgttatcatcctaggtggacttgctccctcctatcctcctacttcaaatgcagaacttcaatcgtttacaaaagaagactgaatcgtataatagaacacacccttattcattggctggcttcaccaatcatctcatggctgaacttgtaaaaatacaatcttagccacgtacctatgaaatgtatgtgtgtgtatatatatatacatgaatttgcttctgagattatggaggctgaaattcccaagatggaaggaaagctggatatccaggaaagcatttgtttcccattaggcctcttaattctctcctggcccttgattgattgcatgaggcccacccctattaaggagggcaatctgcttcacttagtctgcccatcccaatgttaatcgtatctgaaagactctctggaacacaaccagaatcatgtttggccaaatgtcctggcaccctggtgctcggtcacagtgacaactacaagtaactatcacacatgccctttgtcatattggtgatttccactgtttttctcccaaactgcagcttatatttgttctcttaatactgttgagcaaaaacttttaatttttataaagtcgaatttatcaatgttttctttaatggtttgtgtttattgataataaagaacactttgcctaactctgtgtcatgaagattttgtcttatattttctgctatactttttctagttttatagtttatatttagttgcataatccattttgagttagtttttgagttagtattgaggttcaggtgaatttttttcctttgggtataaaaaaaacaaattgtgtaaaaaaagttgtttctacacaatttgttgacaagagaatgccttctccactgaatcatatttgcacctttgtcaatccattgggtggttgagactggtgagaggactgtcctggtgtttggacagagagacagggcatgaagtagggtggttcttatgggaaaaattaaggaagacacatttttgcatgaggaataggaaatccccaagcacaattgggggtaccctctac

SEQ ID NO: 1110 - DNA, 3391 bp, Homo sapiens
gcagggagctgctggatgagaaagagcctgaagtcttgcaggactcactgggtagatggtattcgactccttcaggttatcttgaactgcctgacttaggccagccctacagcagtgctgtttactcattggaggaacagtaccttggcttggctcttgacttggacagtgagtaccttactatgaaggtgataagcctccacctggtcttccagataggggtgatattcctgttccaagtggcccttactgacctgagagatgtcattgccacaggcaggacctatgggcgcatataggttgtaatgaaactgtagtctcagttggaagcctagacatgaaatgggtcagtgagcaaggctctattcctagtctccagccatgcctgtggcaacctgagcccgctctcagcacattggacccaggcagatgtaaaaaattcacagaagtatgatttggactcaagggtttgtagatttcctccttcattctaatttcagtgtctaaaattcttgcatccatgaacgagctgggcatttgatgagacagggctgaatactgcagttttcctcctagaaatcatctggggcattttctttgaactgatgggaacaataaggcataactgtttgcacaaacttgggataaatgattttgggataacgatctaccagaatggggatatttcacccttggttctgagatgcaaaccaaagaatatcatgaccagctttcaggcctcctgaagtatatctgtcacattgtcctgttctcatgctgaggagcctgagatccctgtgtggggattagacagtggactgttatgggtgtaggtgaattggcttattttgtctgtccctgtctgaatgtattgcaggaattaaaaaggaccaagaagaggaagaagaccaaggcccaccatgccccaggtaactgagcaattgtgaacatctacttctgtgttgacatctggagactcctggttcagggaaaacagagcgggctgacattatcgattacatcttttcaagcaagcctgaattattcctactaacattgctgttggttttcattgcagtagatatttaggtttccatttcttcctccccttatcatttactaacctactgtaggtggaccagacttcaaaaactgtattctcatggcgactgcatggaaacttgagcacattttatggaaaattattgagcacagtcttttcatgatccctgtatgctgtgtgtcctgagggcactaactcagagtgtcctgttactccctcatcagtgtgtcacctggacaattcactgagctcgttctctctctctctctctctctgtgtgtgtgtgtgtgtgtgtgtgtgtgtgtgtgtgtgtgtctatctgtctttctctttcattcttttccatttggccctgttctgtcccaacatgaaggcaataatttgttacctcattaatggatctatccttttagttttttaaccacttccctatgctacccatgaaacctagttggggctctgttgtgtctgatttcccctggcttattctttactttttcctccttttccaggctcagcagggagctgctggaggtagtagagcctgaagtcttgcaggactcactggatagatgttattcaactccttccagttgtcttgaacagcctgactcctgccagccctatggaagttccttttatgcattggaggaaaaacatgttggcttttctcttgacgtgggaggtgagtacctttctatgaaggtgataaggatccactgagtcttccatataaagatcatattcctgctccaagtggccattactgagctgagagatgtcattgccacagggaggacctataggcacatgtaggttgaatgaaactctagttctacctggaagcccagacaagggatgggtcagtgagcaagactctcttcctagtctcaggccatacctgtggcgccctgatcctattctcatgacattggacctgggcagatgtgacaaattcagagaactatgattttgactcaagggtttgtagatttcctttttcactctaatttcagtgtctaaagtcctcacaaccatgaacaatctgagtatttgatgagacagggctaaatattgcagtttttctcctagaaatcatttgagggtatttgctttaagttgattggaaaaatatggcgtaactgtttgcacaaacttgggacaaatgatattgggataacgatctactagaatagggacattttacccacagtttctgggagaaaaaccgaggaatttctatcatgaccagccttcaggcctcctgaaatatatctctcacagtgtcctattcttatgctgaggagcctgaggtccctgtgtgaggattagacagtggattgttatgtgtgtaggggaatcagcttaatgtgtctgtccatgtctgaatttattgcagaaattgaaaagaaggggaaggggaagaaaagaaggggaagaagatcaaagaaggaaagaagaaggggaagaaaagaaggggaagaagatcaaaacccaccatgccccaggtgactttcagcaattgtggatgcttaattctgtgttaacacctggaggcaacagattcagggaaaccagattgtgtttgatgtcatgttttcaacgaaggctgaattactcctactgtcattgctgttggttttcattgcagtagatgtttaggtttccatttcttcctccccttatcatttcctaacgtaccataggttgaccatacttcaaaagctgtactctcatggccactgcatcgaattttgagcatattttatggaaaactattgagctcactcttttcatgatcacagtttgctgtgtgtcatgagggcactaactcagagtgtcctttgactcccttaccagtatgtcacctggccaattcactagctcactttctctctgtctctgtctctgtctttctctctctgtctttctctttcattgttttctacctggccctgttctatcccaacataaaggcaataattttttttttttacctcattaatggatctatcctttttcttttctaaccagttccttatgttacttctgaaatctagtggggctctgtggtgtctgattttccctggctgcttctttagttttgtctccttttccaggctcaacggcgtgctgatggaagtggaagagcctgaagtcttgcaggactcactggatggatgttattctactccgtcaatgtactttgaactacctgactcattccagcactacagaagtgtgttttactcatttgaggaacagcacatcagcttcgccctttacgtggacaataggttttttactttgacggtgacaagtctccac

SEQ ID NO: 1111 - DNA, 5860 bp, Homo sapiens
tccatttggccctgttctgtcccaacatgaaggcaataatttgttacctcattaatggatctatccttttacttttttaaccacttccttatgctacccatgaaacctagttggggctctgttgtgtctgatttcccctggcgtattctttactttttcctccttttccaggctcagcagggagctgctggaggtagtagagcctgaagtcttgcaggactcactggatagatgttattcaactccttccagttgtcttgaacagcctgactcctgccagccgtatggaagttccttttatgcattggaggaaaaacatgttggcttttctcttgacgtgggaggtgagtacctttctatgaaggtgataaggatccactgagtcttccatataaagatcatgttcctgctccaagtggccattactgagctgagagatgtcattgccacagggaggacctataggcacatgtaggttgaatgaaactctagttctacctggaagcccagacaagggatgggtcagtgagcaagactctcttcctagtctcaggccatacctgtggcgccctgatcctactctcatgacattggacctgggcagatgtgacaaattcagagaactatgattttgactcaagggtttgtagatttcctttttcactctaatttcagtgtctaaagtcctcacaaccatgaacaatctgagtatttgatgagacagggctaaatattgcagtttttctcctagaaatcatttgagggtatttgctttaagttgattgtaaaaatatggcataactgtttgcacaaacttgggacaaatgatattgggataacgatctactagaatagggacattttacccacagtttctgggagaaaaaccgaggaatttctatcacgaccagccttcaggcctcctgaaatatatctctcacagtgtcctattcttatgctgaggagcctgaggtccctgtgtgaggattagacagtggattgttatgtgtgtaggggaatcagcttaatgtgtctgtccatgtctgaatttattgcagaaattgaaaagaaggggaaggggaagataagaaggggaagaagatcaaagaagaaaagaagaaggggaagaaaagaaggggaagaagatcaaaacccaccatgccccaggtgactttcagcaattgtggatgcttagttctgtgttaacacctggaggcaacagattcagggaaaccagagtgtgtttgatgtcatgttttcaacgaaggctgaattactcctactgtcattgctgttggttttcattgcagtagatgtttaggtttccatttcttcctccccttatcatttactaacgtaccacaggttgaccatacttcaaaagctgtactctcatggccactgcatcgaattttgagcatattttatggaaaactattgagctcactcttttcatgatcacagtttgctgtgtgtcatgagggcactaactcagagtgtccttttactcccttaccagtatgtcacctggccaattcactaggtcactttctctctgtctctgtctctgtctctctctctctgtctttctctttcattgttttctacctggccctgttctatcccaacataaaggcaataatttgttacctcattaatggatctgtcctttttcttttctaaccacttccttatgttacttctgaaatctagtggggctctgtggtgtctgattttccctggctgcttctttagttttgtctccttttccaggctcaacagcgtgctgatggaagtggaagagcctgaagtcttacaggactcactggatagatgttattcgactccatcaatgtactgtgaactacgtgactcattccagcactacagaagtgtgttttagtcatttgaggaacagcacatcagctttgcccttgacatggacaataggttctttactttgacggtgacaagtctctatctggtcttccagatgggagtcatattcccacaataagcagcccttactaagccgagaggtgtcattcctgcaggcaggacctataggcgcctgaagatttgaatgaaactatagttccatttggaagcccagacataggatgggtcagtgggcatggctctattcctattctcagagcatgccagtggcaacctgtgctcagtctgaagacaatggacccacgttaggtgtgacacgttcacataactgtgcagcacatgccgggagtgatcagtcggacattttaatttgaaccacgtatctctgggtagctacaaaattcctcagggatttcattttgcaggcatgtctctgagcttctatacctgctcaaggtcattgtcatctttgtgtttagctcatccaaaggtgttaccctggtttcaatgaacctaacctcattctttgtgtcttcagtgttggcttgttttagctgatccatctgtaacacaggagggatccttggctgaggattgtatttcagaaccaccaactgctcttgacaattgttaacccgctaggctcctttggttagagaagccacagtccttcagcctccaattggtgtcagtacttaggaagaccacagctagatggacaaacagcattgggaggccttagccctgctcctctcaattccatcctgtagagaacaggagtcaggagccgctggcaggagacagcatgtcacccaggactctgccggtgcagaatatgagcaatgccatgttcttgcagaaaacgcttaacctgagtttcataggaggtaatcaccagacaactgcagaatgtagaacactgagcaggacaactgacctgtctccttcacatagtccatatcaccacaaatcacacaacaaaaaggagaagagatattttcggttgaaaaaaagtaaaaagataatgtagctgcatttctttagttattttgaaccccaaatatttcctcatctttttgttgttgtcatggatggtggtgacatggacttgtttatagaggacaggtcagctgtctggctcaatgatctacattctgaagttgtctgaaaatgtcttcatgattaaattcagcctaaacgttttgccgggaacactgcagagacaatgctgtgagtttccaacctcagcccatctgcgggcagagaaggtctagtttgtccatcaccattatgatatcaggactggttacttggttaaggaggggtctaggagatctgtcccttttagagacaccttacttataatgaagtacttgggaaagcagttttcaagagtataaatatcctgtattctaatgatcatcctctaaacattttatcatttattaatcctccctgcctgtgtctattattatattcatatctctacactgcaaattttgggtctcaatttttactgtgcctttgtttttactagtgtctgctgttgcaaaaagaagaaaacattctctgcctgagttttaatttttgtccaaagttaattttaatctatacaattaaaaccttttgcctatcactctggacttttggattgtttttcacattcagtgttataatatttgattatgctgattggttttggtgggtactgatgcgaattaataaaaacatttcatttccatgtttattttgtaatctcttccacattgtaggctatgtttaccatacgtagcagaatgtgtttacatttcttggttctagtcatttgtattcttcgtgagtgtgagagtgtgtgtgtgtgtgtgtgtgtctgtgtgtgcctttggcatttaggaagggttgtatagctcatgttaaatattgcactaaaaatgtttttgatggttttcctccctttgaactagacacacttctaatatttggtttatagttttaaattataactttcagcatcaaatatttccatacaacagtcaattacatgatgtgttttcttttttctacctcctttacctgccacttctcataatagtatttgaacctaaacatataccggtgacattctgtgattatcatcttgcccctaccttggtttttggtttagatccacaatgaaatatattaacgctcatgagctattcaaaagtgaatgtcacagtcatcacttgctgagtggtactcatccttaacagagtcctcatgagggaatcaggtctcgctgagtttagcatgtttaataatcttttctcacggtctcgatacatggatcgcattactagatataaggtgcttgcccaaaatgatttttctggagtttttaggagatattgtcttccttgggggacatacatggtgtatgttctcattgtgggattcgattttgttctaccaggacctctaatttctgccagttacttcactcatttgttctcttcaccatgagtctccagaggatacttccatggtccgtgcctccccatctcccagtaattctgcatttccaagattggcacctctggtcctctgcacggtgaagccccttcctttcaattccccagtagccagtgctctaatccaccaggtctcaggcatgatctatgtttctccacactcgctttctgaggatagttttgcctgggttctatcatgaacaggccctccctgctgtcctggcctctatttgcatagtgtttcctgctccctctgccgtcgtgtggctcccagacctggctaaagaaaatcacctgagggccacagtgttccctagccctggtgtttaggggcaggattatgggtgagatttttgagtctctaagttgacccctacggctctgaagtgtatgttgagaaattcagctgttatcatcctaggtggacttgctccctcctatcctcctacttcaaatgcagaacttcaatcgtttacaaaagaagactgaatcgtataatagaacacacccttattcattggctggcttcaccaatctcatggctgaacttgtaaaaatacaatcttagccacatacctatgaaatgtatatgtgtgtgtatatatatacatgaatttgcttctgagattatggaggctgaaattcccaagatggaaggaaagctggatacccaggaaagcatttgtttcccattaggcctcttaattctctcctggcccttgattgattgcatgaggcccacccctattaaggagggcaatctgcttcacttagtctgcccatcccaatgttaatcgtatctgaaagactctctggaacacaaccagaatcatgtttggccaaatgtcctggcaccctggtgctcggtcacagtgacaagtacaagtaactatcacacatgccctttgtcatattggtgatttccactgtttttctcccaaactgcagcttatatttgttctcttagtactgttgagcaaaaacttaatttttataaagtcgaatttatcaatgttttctttaatggtttgtgtttattgataataaagaacactttacctaactctgtgtcatgaagattttgtcttatattttctgctatactttttctagttttatagtttatatttagttgcataatccattttgagttagtttttgagttagtattgaggttcaggtgaatttttttcctttggggataaaaaaaaaattgtgtaaaaaaaagttgtttctacacaatttgttgacaagagaatgccttctccactgaatcatatttgcacctttgtcaatccattgggtggttgagactggtgagaggactgtcctggtgtttggacagagagacagggcatgaagtagggtggttcttatgggaaaaattaaggaagacacatttttccatgaggaataggaaatccccaagcacaattgggggtaccctctac

SEQ ID NO: 1112 - DNA, 2871 bp, Homo sapiens
ttgtttatagaggacaggtcagctgtctggctcaatgatctacattctgaagttgtctgaaaatgtcttcatgattaaattcagcctaaactttttgacgggaacactgcagagacaatgctgtgagtttccaacctcagcccatctgcgggcagagaaggtctagtttgtccaacaccattatgatatcaggactggttacttggttaaggaggggtctaggagatctgtcccttttagagacaccttacttataatgaagtacttgggaaagtggttttcaagagtataaatatcctgtattctaatgatcatcctctaaacattttatcatttattaatcctccctgcctgtgtctattattatattcatatctctacgctgcaaattttgggtctcaatttttactgtgcctttgtttttactagtgtctgctgttgcaaaaagaagaaaacattctttgcctgagttttaatttttgtccaaagttaattttaatctatacaattaaaaccttttgcctatcactctggacttttggattgttttttacattcagtgttataatatttgattatgctgattggttttggtgggtactgatgcgaattaataaaaacatttcatttccatgtttattttctaatctcttccacattgtaggctatgtttaccatacgtagcagaatgtatttacatttcttggttctagtcatttgtattcttcgtgagtgtgtgtgtgtgtgtgtgtctgtgtgtgtgtcctgtgtgtgcctttggcatttaggaagggttgtatagctcatgttaaatattgcactaaaaatgtttttgatggttttcctccctttgaactagacacacttctaatatttggtttatagttttaaattataactttcagcatcaaatatttccatacaacagtcaattacatgatgtgttttctttttcctacctcctttacctgccacttctcataatagtatttgaacctaaacatataccggtgacattctgtgattatcatcctgcccctaccttggtttttatccattgtggtttagatccataatgaaatatattaacgctcatgagctattcaaaagtgaatgtcactgtcatcacttgctgagtggtactcatccttaacagagtcctcatgagggaatcaggtctcgctgagtttagcatgtttaataatcttttctcacggtctcgatacatggatcacattactagatataaggtgcttgtccaaaatgatttttctggagcttttaggagatattgtcatccttgggggacatacatggtgtatgttctcattgtgggattctattttgttctaccaggacctctaatttctgccagttacttcattcatttgttctcttcgccatgagtctccagaggatacttccatggtccgtgcctccccatctcccagcaattctgcatttccaagattggcacctctggtcctctgcacggtgaagccccttcctttcaattccccagtagccagtgctctaatccaccaggtctcaggcatgatctatgtttctccacactcgctttctgaggagagttttgcctgggttctatcatgaacaggccctccctgctgtcctggcctctatttgcatagtgtttcctgctccctctgccgtcgtgtggctcccagtcctggctaaagaaaatcacctgagggccacagtgttccctagccctggtgtttagggcaggattatgggtgagatttttgagtctctaagttgacccctatggctctgaagtgtaagttgagaaattcagctgttatcatcctaggtggacttgctccctcctatcctcctacttcaaatgcagaacttcaatcgtttacaaaagaagactgaatcgtataatagaacacacccttattcattggctggcttcaccaatcatctcatggctgaacttgtaaaaatacaatcttagccacatacctatgaaatgtatatgtgtgtgtatatatatacatgaatttgcttctgagattatggaggctgaaattcccaagatggaaggaaagctggatatccaggaaagcatttgtttcccattaggcctcttaattctctcctggcccttgattgattgcatgaggcccacccctattaaggagggcaatctgcttcacttagtctgcccatcccaatgttaatcgtatctgaaagactctctggaacacaaccagaatcatgtttggccaaatgtcctggcaccctggtgctcggtcacagtgacaactacaagtaactatcacacatgccctttgtcatattggtgatttccactgtttttctcccaaactgcagcttatatttgttctcttaatactgttgagcaaaaacttttaatttttataaagtcgaatttatcaatgttttcttcaatggtttgtgtttattgataataaagaacactttgcctaactctgtgtcatgaagattttgtcttatattttctgctatactttttctagttttatagtttatatttagttgcataatccattttgagttaatttttgagttagtattgaggttcaggtgaatttttttcctatggggataaagaaaaacaaattgtgtaaaaaaagttgtttctacacaatttgttgacaagagaatgccttctccactgaatcatatttgcacctttgtcaatccattgggtggttgagactggtgagaggactgtcctggtgtttggacagagagacagggcatgaagtagggtggttcttatgggaaaaattaaggaagacacatttttgcatgaggaataggaaatccccaagcacaattgggggtaccttctac

SEQ ID NO: 1113 - DNA, 4998 bp, Homo sapiens
gcagttagtataattgtattttaattaaatagggaggttgaagattttttaaatatcaaattctgtaaataaaaagtatgatttacagtctgaaatggaagaaggcagtggattaaacattgcagaagagaagattattgaactagaaggaatagaatttgaaactaacataaatgaaacacacagtaacaaatgacttgaaaacataaaaagaccatcggcatcaaaactttaaaccccccagtatagggctaaatggaatccctgaagggcgtgtagtggagaagagagaaaaagatatttaaaacatactggatgaaagatttagaagctccatggaaaccataaacttcaaatattacagaaatatgattattctaagaacaagaaacatgaagaaaacttcaccaaggaatgccttaatcaaatccatcaaaaccagtgataaaaaggaaatcctaaaaggaataaaaagggaaagaacatgttacatacagagcactaaatataatgatggcataagatttctcatacaaacaagaagtttgcaataaagaacttaaaaaaaagaaaaactgtcacctacaattctacacctggccaaattatcttttaaaaataaacatgagaaaaagtgtttttgaacagaaaacaaaatgatctcaatttgcagatggtgtgatcctatgcatagaaaatcccaaataatacctacagatgcaaacacacatacatgcacacagaggccagtcacacacacacacacacacacacactcacatacacacactactagagttaataagcgaattcagcaaactttcagcaaacaatcagttgtgttagcaatgaacaatctgagaagaaaattgacacaatgatttcatttataatagcactggtaagaataatatgcctgggaataaatttgttcaagaaggtgcagtacttgtacacagacaactacagaacattgctcgaggagattcaggaagacctaaatcaatggacagacatcttgtgtccatgggttggaagttgtaacatggttaagataaaaatacaactcaaagcaacccacagattcaatacaatcctatcaaaaagtggccttttttacaggaatgcctaacaagaacttcatattcctaaaaaatagtgtgtccccccaaaacaaaagcaatcttgaaatgcaagaagaaacattttctattccaaaggtctttaactgctctaagcagtacttggtagtcttcaatatataggctttcacatctctttttttcttcttttgtttctgcacaggatctcactctttcacccaggctggagtacagtggcacaatcacagctcactgcagcatggaattctcaggcctatgacatcctagggcctcatccactgattcctgggactacaggctcacaccaccaaacccggataatttttctgattttcagtagagatgagggctcactatgttgcctaggctagtttcaagcttatgagatcaagcaaccctcctgccacagccttccaaagtgctgggatttgaggccaagcctggctggctttcatgtcttttctatgtagtttatatttctggatgccattgagagtctggctggctttcacatatttgctatgtcgtttatatttcttgatgctattgtaaatgtttattaaaggaatcttttaaaaactttgttttggccaggcgcggtggtccatgcctgtaatcctaccactttgggaggccgaggtgggtggatcatgaggtcagaagatcgagaccatcctggctaacatggtgaaaccccatctctactaaaaatacaaaaaaaaaaaaattagcctggcgtggtggcgggcgcctgtagtcccagatacttgggaggctgaggcaggagaatggcgtgaacctgggaggtggagcttgcagtgagccaagatggtgccactgcactccagcctgggagacagagtgagactccgtctcaaaaaaaaaattgtattaaaattatatatttaaggaattacatatatatttatatatatatataatacatatccttaaattatatatatttaaggaatacaacctgaggactacatatacatatacataatgaactaatgcctactaggtgaggggctgccttgtgagcaaacccaaggtccttggcttatgaagcctttgtctagaaggatggagggatcagcaaggtgggcacacagcaggttctgtctttggtgtgggcttctgcccactcgggtctctggcaatactaatcaggcttcacgatgggtgaggtgagctaggaatgggaaagtggatgacttcagatccagagactgcagttgtcacctggggacctggcgtaggggtggaggagtctcccactgacttggccatgggtcaatgcccaaacatgcacaaggatgggactctcggcctcaatgctttaggagcccccagtcttctaaagagggtttgtggtggggaagaatgttcaacaaaacagaagagttatgggtgctctagcttggcaacggagaatacttccttgtgctactaaatggcaatatttgacaattacggatgacacaattgagcaacagctttcactgtttaacaagcagtgtctctggaacactaggttagtgctgtcggatgttgactgaaaagtcagtggtttgagcccatccagtcatattaatgtttctagctgacgtgaccttccatctgaagagtctcttccttggaccaaatatctcttaaagcttctcttcttcttgtctcttgtctattttctaaggtgcctctttgttgcttggggcaaaaaaagtccatttttaatccacacccaacaaacatctacccttacgtatcctggtttttagggttttgagtttgttgtttgttttctcagcttctcatatttggaatactggaaattcctaaagtggagaatgacagaacgtgaatcacagctatggtgaagccacaggctctggatgaaaaacctaatctgccagggtttgaagttaaacacattaatcttctgtgcctccatttctatctgtccaatgggctaaatcagaacacttaggttgtccagtgtttaaatgagcagtgcaggaaaagcatggagccaatgcctgtcacgtagtaattggacaacacgcatgagctcctatcagcgccatggtctccagcatttccatcaggttttgatctttgaaatgtccttcttgatatgaaaggatcattcctcaaacattctctaaccgatggccatgaaattgctccaatgtgtattattacaaatacaactgcagggaccagactgacacatgtatctgtcgtgcatcgcttgtctatttctccgtagacacctggagatggaattgtcagaccaaagtatttatacatgtttgattttgctaatttctgtctaaattactgtgaaaagaaaatataatatgtcatacttttaatattttttgagaattcttttttctccatcttctggtcaaaactgggaagtacttgcctaccatttcctctgaacttacttttgccaacatttgtgtagtcatacagtgggatcacattgtatgcaagacatcaaactcaaatccttaaatgaaagcgattaacatgactgtgtaaaaacttatcttcaaaatacaatgaatacatatatacacatacttatatgggaaaggaattatttggatactttatcaaagttatatatacttgaaaatttgtttagtaaaatagcagtgcccttgtgtactcccagagtttcatcacatagaagcaattatttcattatttatctccttatgcctaaatagatattattactttttgattttcaagtttaggcactacctctccttcacatacttgctcatcaccaccacccccaaacacgcctctcaccaccttacccttcaacacgtttgtgtcctcgtttgctgggtcaattgctacattgttataacttgtatattttattcagagttcagtcacattggatatacatagcaggaatgagaggccagtatcttcagggactctctctcaagtagataagcttcagagatttttgtagtctttggtcactctccccatctttttcctattccaggtaagtactggatctgatgggcccagctcaggtcaggcactctctccttgagcaggggagagcgggacatcttcatgtgcagtaccaggaagacactgtccaaagagggacaggtagttctaagacagaaaagtctgtctggggtacaggtaggcaaaacaaggacacacacacaaaaattagtctgttctgtgaggggagcatgcagtagagggtggattcagagtgggaggggagagttttgagagatatgggccatggatatcactctgtgggccggagccacacaagacggttggggtctctcaggggcagggagctgaggaggatctgccctccccaacctgggagactggtgaggggactgtcctggtcaccagacagaaatggggtctgggccagggcagttctggtgggaaagaaagaacaggacatctccttaaggaaaggtcctgagtcaggtcttggtagggagggaggttaccttgcccattggcagctgaagatggttggccagatgagggcactgaaatccatgtcctctaaacttgtagttcagtaaaagaacgacagcagtaaagggtctttaggaagaggaggtggaagacctgatttgggttgggggctccaagaagaatgtctgccttgctgtgcagaagcctgctacacaacctccctggtccccttgctcagtctcctggccagacccctgtgagccctggaagtgcacagtcagctcggccaaggcatctccagccaggactcatccctgggcatttctgtggccttgggtgccctggcctccaggccctgtcttgcaggcaatcatcctgc

SEQ ID NO: 1114 - DNA, 437 bp, Homo sapiens
gaaattgaaaagtaccaagaagtggaagaagaccaagacccatcatgccccaggtaactttgagcaattatggatgcttaattctgtgttgacacctggagatgccaggtccagggaaaacaagagtgtgttcaatttcatgttttcaacggaggttgaattactcctactgccattgctgttggttttcattgcagtagatgtttaggtttccatttcttcctccccttatcatttactaacttactataggttgaccatacctcaaaggctgtatggcaactgcatggaatcttgagcaagtttatggaaaattattgagcccactcttttcatgatcactgttcgctgtgtgtcccgagggcactaactcagagtgtcctttgaccccttcatcagtgtgtcacccggccaattcgctgagctcactttctcct

SEQ ID NO: 1115 - DNA, 5008 bp, Homo sapiens
gcagttagtataattgtattttaattaaatggggaggttgaagattttttaaatatcaaattctgtagataaaaagtatgatttacagtctgaagtggaagaaggcagtggattaaacattgcagaagagaagattattgaactagaaggaatagaagttgaaactaacataaatgaaacacacagtaacaaatgacttgaaaacataaaaagaccattggcatcaaaactttaaaccccccagtatagggctaaatggaatccctgaagggcgtgtagtggagaagagagacaaagatatttaaaacatactggatgaaagatttagaagctccatggaaaccataaacttcaaatattacagaaatatgattattctaagaacaagaaacatgaagaaaacttcaccaaggaacgccttaatcaaatccatcaaaaccagtgataaaaaggaaatcctaaaaggaataaaaagggaaagaacatgttacatacagagcactaaatataaggatggcataagatttctcatacaaacaagaagtttgcaataaagaacttaaaaaaagaaaaactgtcacctacaattctacacctggccaaattatcttttaaaaataaacatgagaaaaagtatttttgaacagaaaacaaaatgatctcaatttgcagatgttgtgatcctatacatagaaaatcccaaataatacctacagatgcaaacacacatacatgcatacagaggccagacacacacacacacacacacacacacacacacactcacatacacacactactagagttaataagtgaattcagcaaactttcagcaaacaatcagttgtgttagcaatgaacaatctgagaagaaaattgacacaatgatttcatttataatagcacttgtaagaataatatgcctgagaataaatttgttcaagaaggtgccgtacttgtacacagacaactacagaacattgctcgaggagattcaggaagacctaaatcaatggacagacatcttgtgtccatgggttggaagttgtaacatggttaagataaaaatacaactcaaagcaacccacagattcaatacaatcctatcaagaagtggccttttttacaggaatgcctaagaagaacttcatattcctaaaaaatagtgtgtccccccaaaacaaaagcaatcttgaaatgcaagaagaaacattttctattccaaaggtctttaactgctctaagcagtacttggtagtcttcaatatataggctttcatatctctttttttcttcttttgtttctgcacaggatctcactctttcacccaggctggagtacagtggcacaatcacagctcactgcagcatggaattctcaggcctatgacatcctagggcctcatccactgattcctgggactacaggctcacaccaccaaacctggataatttttctgattttcagtagagatgagggctcactatgttgcctaggctagtttcaagcttctgagatcaagcaaccctcctgccacagccttccaaagtgctgggattcgaagccaagcctggctggctttcatgtcttttctatgtagtttatgtttctggatgccattgagagtctggctggctttcacatatttgctatgtcgtttatatttcttgatgttattgtaaatgtttattaaaggaatcttttaaaaactttgttttggccaggtgcggtggtccacgcctgtaatcctagcactttgggaggccgaggtgggtggatcatgaggtcagaagatcgagaccatcctggctaacatggtgaaaccccattcctactaaaaatacaaaaaaaaaaattagcctggcgtgatggcgggcgcctgtagtcccaggtacttggaaggctgaggcaggagaatggcgtgaacctgggaggtggagcttgcagtgagccaagatggtgccactgcactccagcctgggagacagagtgagactccgtctcaaaaaaaaaaaattgtattaaaattatatatttaaggaattacatatatatttatatatatataatacatatccttaaattatatatatttaaggaatacaatctgaggactacatatacatatacataatgaactaatgcctactaggtgaggggctgccttgtgagcaaacccaaggtccctggcttatgaagcctttgtctagaaggagggagggatcagcaaggtgggcacacagcaggttctgtctttggtgtgggcatctgcccactcgggtctctggcaatactaaccaggcttcacgatgggtgaggtgagctaggaatgggaaagtggatgacttcagatccagagactgcagttgtcacctggggacctggcgtaggcgtggaggagtctcccactgacttggccctgggtcaatgcccaaacatgcacaaggacgggactctcggcctcaatgctttaggggcccccagtcttctaaagagggtttgtggtggggaagaatgttcaacaaaacagaagagttatgggtactctagcttggcaacggagaatacttccttgtgctactaaatggcaatatttgacaattacggatgacacaattgagcaacagctttcactgtttaacaagcagtgtctctggaacactgggttagtgctgtcggatgttgactgaaaagtcagtggtttgagcccatccagtcatattaatgtttctagctgatgtgaccttccatctgaagagtctcttccttggaccaaatatctcttaaagcttctcttcttcttgtctcttgtctattttctaaggtgcctctttgttgcttggggcaaaaaaagtccattttaaatccacacccaacaaacatctacccttacgtatcctggtttttagggttttgagtttgttgtttgttttctcagcttctcatatttggaatactggaaattcctaaagtggaaaatgacagaacgtgaatcacagctatggtgaagccacaggctctggatgaaaaacctaatctgccagggtttgaagttaaacacatgaatcttctgtgcctccatttctatctgtccaatgggctaaatcagaacacttaggttgtccagtgtttaaatgagcagtgcaggaaaagcctggagccaatgcctgtcatgtagtaattggtcaacacgcatgagctcctatcagcgccatggtctccagcatttccatcaggctttgatctttgaaatgtccttcttgatatgaatggatcattcctcaaacattctctaactgatggccatgaaattgctccaatgtgtattattacaaatacaactgcagggaccagactgacacatgtatctgtcgtgcatcgcttgtctatttctctgtagacacctggagatggaattgtcagaccaaagtatttatacatttttgattttgctaatttctgtctaaattactgtgaaaagaagatataacatgtcatacttttaacattttttgagaattctctttttctccatcttctggccaaaactgggaagtacttgcctaccaattcctctgaactcacttttgccaacatttgtgtagtcatacagtgagatcacattgtatgcaagacatcaaactcaaatccttaaatgaaagcgattaacatgactgtgtaaaaatttatcttcaaaatacaatgaatacatatatacacatatttatatgggaaaggaattatttggatactttatcaaagttatatatacttgaaaatttgtttagtaaaatagcagtccccttgtgtactcccagagtttcatcacatagaagcaattatttcgttatttatctccttatgtctaaatagatattattactttttgattttcaagtttaggcactacctctccttcacatacttgctcatcaccaccacccccaaacacgcctctcaccaccttaccctccaacacgtttgtgtcctcatttgctgggtcaattgctacattgttataacttgtatattttattcagagttcagtcacattggatatacatagcaggaatgagaggccagtatcttcagggactctctctcaagtagataagcttcaaagatttttgcaatctttggtcaccctccccatcgttttcctattccaggtaagtactggatctgatgggcccagctcaggtcaggcactctctccttgagcaggggagagcgggacatcttcatgtgtactaccaggaagacactgttcaaagagggacaggtagttctaagacagaaaagtctgtctggggtacaggtaggcaaaacaaggacacacacacaaaaattagtctgttctgtgaggggagcatgcagtagagggtggattcagagtgggaggggagagttttgagagatatgggccatggatatcactctgtgggccggagccacacaagacggttggggtctttcaggggcagggagctgaggaggatctgccctccccaacctgggagactggtgaggggactgtcctggtcaccagacagaaatggggtctgggccagggcggttctggtgggaaagaaagaacaggacatctccttaaggaaaggtcctgagtcaggtcttagtagggagagaggttaccttgggcattggcagctgaagatgcttggccagatgagggcactgaaatccatgtcctataaacttgtagttctagtaaaagaatgacagcagtaaagggtctttaggaagaggaggtggaagacctgttttgggttgggggctccaagaagaatgtctgccttgctgtgcagaagcctgctacacaacctccctggtccccttccttagtctcctggccagacccctgtgagccctggaagtgcacaatcagctcagccaaggcatctccagctgggactcatccctgggcatttctgtggccttgggtgccctggcctcctccaggccctgtcttgcaggcaatcatcctgc

SEQ ID NO: 1116 - DNA, 423 bp, Homo sapiens
ctggtatgttttctagataaatggctgacttttcacccacaaaagccataatagctgatgcttctgtgtagaaccaagtttcattttgactcaagagctggtacattgcaccccctcatcaaatctctgtgtccacaatctcataaactatcaaattctgggtatttgatgagagaaagcttaatattgaagtatctctcctatgaggtgttagaactatttgcctacaatttattggggaaaaaattgctcatttgtgtacataaacctaggacagagcacatagggaagataacattccaactcaggggaattttgcccaaggctcatgaaagaacccaagccagttttctcaagacttgacctcaggcctactggaatatttctctcaaagtctcctgttctcacattgacaagactgat

SEQ ID NO: 1117 - DNA, 560 bp, Homo sapiens
gcagttagtataattgtattttaattaaatagggaggttgaagattttttaaatatcaaattctgtaaataaaaagtatgatttacagtctgaaatggaagaaggcagtggattaaacattgcagaagagaagattattgaactagaaggaatacaagttgaaactaacataaatcaaacacacagtaacaaatgacatgaaaacataaaaagaccatcggcatcaaaactttaaaccccctagtatagggctaaatggaatccctgaagggcgtgtagtggagaagagagacaaagatatttaaaacatactggatgaaagatttagaagctccatggaaaccataaacttcaaatattacagaaatatgattattctaagaacaagaaacatgaagaaaacttcaccaaggaacgccttaatcaaatccatcaaaaccagtgataaaaaggaaatcctaagaagaataaaaagggaaagaacatgttacatacagagcactaaatataatgatggcataagatttctcatacaaacaagaagtttgcaataaagtact
